(19) United States
(12) Patent Application Publication
(10) Pub. No.: US 2004/0265961 A1
(43) Pub. Date: Dec. 30, 2004

(54) Novel proteins homologous to kinase suppressor of Ras

(76) Inventors: Wei Liu, Sudbury, MA (US); Leeying Wu, Lexington, MA (US); Padma L. Channavajhala, Woburn, MA (US); Lih-Ling Lin, Concord, MA (US); Yuhua Zhang, Wellesley, MA (US)

Correspondence Address: FITZPATRICK CELLA (WYETH), 30 ROCKEFELLER PLAZA, NEW YORK, NY, 10112-3800, US

(21) Appl. No.: 10/812,232

(22) Filed: Mar. 29, 2004

Related U.S. Application Data
(60) Provisional application No. 60/457,928, filed on Mar. 28, 2003.
(60) Provisional application No. 60/491,283, filed on Jul. 31, 2003.

(51) Int. Cl. C12N 9/12; C07H 21/04

(52) U.S. Cl. 435/69.1; 435/194; 435/320.1; 435/325; 536/23.2

(57) ABSTRACT

The invention provides isolated protein kinase polypeptides homologous to Kinase Suppressor of Ras (KSR), and the isolated nucleic acid molecules that encode these polypeptides. The novel polypeptides and nucleic acid molecules of the invention are termed KSR-2. The invention also provides genetically engineered expression vectors, host cells, and transgenic animals comprising the novel nucleic acid molecules of the invention. The invention additionally provides antisense and RNAi molecules to the nucleic acid molecules of the invention. The invention further provides inhibitors, activators, and antibodies capable of binding to the protein kinase polypeptides of the invention. The invention also provides for the regulation of Cot/Tp12-mediated cellular functions, such as ERK and NF-κB activation, as well as IL-8 production, through the use of the nucleic acid and protein kinase polypeptide molecules of the invention.

[0001] This application claims the benefit of U.S. Provisional Application Ser. No. 60/457,928, filed Mar. 28, 2003, and U.S. Provisional Application Ser. No. 60/491,283, filed Jul. 31, 2003, both of which are incorporated herein by reference in their entireties.

### BACKGROUND OF THE INVENTION

[0002] 1. Field of the Invention

[0003] The present invention is directed to novel proteins homologous to kinase suppressor of Ras (KSR), as well as nucleic acid molecules encoding such novel proteins. More specifically, the present invention provides novel peptides and proteins that function in the Ras pathway, as well as nucleic acid molecules encoding such peptides and proteins.

[0004] 2. Related Background Art

[0005] The Ras pathway plays a critical role in the transmission of many growth and developmental signals. A major route by which Ras transmits these signals is through the sequential activation of various cytoplasmic kinases, including Raf, MEK and MAP kinase (MAPK).

[0006] Recently, large-scale genetic screens performed in Drosophila and C. elegans led to the isolation of a new component of the Ras pathway, which was termed kinase suppressor of Ras (KSR) (Kornfeld et al. (1995) Cell 83:903-13; Sundaram and Han (1995) Cell 83:889-901; Therrien et al. (1995) Cell 83:879-88). KSR constitutes a protein kinase family that is structurally related to the Raf family of kinases (Sundaram and Han (1995), supra).

[0007] The presence of a putative kinase domain in KSR suggested that KSR might act as a kinase in the Ras pathway. This notion was bolstered by the fact that many of the KSR-inactivating mutations identified in Drosophila and C. elegans occur in the kinase domain. In addition, some evidence suggested that KSR is a ceramide- and EGF-activated protein kinase that can phosphorylate Raf-1 on threonine 269 in vitro and can thereby increase the kinase activity of Raf (Zhang et al. (1997) Cell 89:63-72; Xing and Kolesnick (2001) J. Biol. Chem. 276:9733-41).

[0008] Several observations, however, have cast doubt on whether KSR functions as a kinase. First, all mammalian KSR proteins contain an arginine residue at a position in the ATP-binding domain that is normally occupied by a lysine residue that is involved in the phosphotransfer reaction and is usually required for enzymatic activity (Therrien et al., supra). Second, unlike in vitro studies, the phosphorylation of Raf on threonine 269 has not been reported in vivo (Morrison (2001) J. Cell Sci. 114:1609-12). Third, KSR constructs that lack the putative kinase domain augment Raf-1 in a kinase-independent manner (Michaud et al. (1999) Proc. Natl. Acad. Sci. USA 94:12792-96). Fourth, KSR proteins containing mutations expected to eliminate kinase activity rescue the KSR loss-of-function phenotype in C. elegans (Stewart et al. (1999) Mol. Cell Biol. 19:5523-34). Finally, the isolated catalytic domain of KSR, rather than enhancing Ras-dependent signaling, acts as a dominant inhibitory protein that blocks Ras signaling and MAPK activation in mammalian, Xenopus, and Drosophila cells (Therrien et al. (1996) Genes Dev. 10:2684-95; Yu et al. (1997) Curr. Biol. 8:56-64; Joneson et al. (1998) J. Biol. Chem. 273:7743-48).

[0009] Recent evidence suggests that KSR facilitates the signaling of Ras by acting as a scaffolding protein that coordinates the assembly of a multiprotein complex containing MAPK and its upstream regulators. KSR has been shown to interact with Raf-1, MEK, and MAPK (Roy et al. (2002) Genes Dev. 16:427-38; Muller et al. (2000) Mol. Cell. Biol. 20:5529-39; Xing et al. (1997) Curr. Biol. 7:294-300; Denouel-Galy et al. (1997) Curr. Biol. 8:46-55; Yu et al. (1997), supra) and to translocate from the cytosol to the plasma membrane in response to Ras activation and growth factor treatment (Muller et al. (2001) Mol. Cell. 8:983-93; Michaud et al. (1997), supra). In addition, KSR-deficient mice have attenuated MAPK activation to a degree sufficient to block T-cell activation and tumor development (Nguyen et al. (2002) Mol. Cell. Biol. 22:3035-45). These observations suggest a model in which KSR provides a scaffold that facilitates the phosphorylation reactions that are required for executing critical signal transduction steps downstream of Ras.

[0010] Further support for the KSR scaffolding model has come from findings that other accessory proteins involved in the Ras pathway also interact with KSR. Hsp90, Hsp70, Hsp68, p50^{cdc37}, G protein γ subunits and 14-3-3 proteins were shown to interact with KSR and appear to be required for protein stability, as disruption of these interactions results in rapid KSR degradation (Stewart et al. (1999), supra). In particular, 14-3-3 proteins appear to play a critical role in KSR function by binding to two phosphoserine residues, thereby maintaining KSR in an inactive state until activated Ras-induced dephosphorylation occurs (Muller et al. (2001), supra; Cacace et al. (1999) Mol. Cell. Biol. 19:229-40).

[0011] The KSR scaffolding model offers an attractive explanation for the observation that the biological effects of KSR vary with the level of KSR protein expressed. When KSR is expressed at low or near physiological levels, it functions as a positive effector of Ras signaling (Therrien et al. (1996), supra; Cacace et al. (1999), supra; Muller et al. (2000), supra). When KSR is highly overexpressed, however, it inhibits Ras signaling in mammalian, Xenopus, and Drosophila cells (Denouel-Galy et al. (1998), supra; Sugimoto et al. (1997) EMBO J. 17:1717-27; Yu et al. (1997), supra; Joneson et al. (1998), supra; Cacace et al. (1999), supra), suggesting that when the level of KSR drastically exceeds the levels of its interacting components, nonfunctional complexes that lack critical components form and inhibit signal transmission (Morrison (2001), supra). The scaffolding model also accounts for the dominant inhibitory effect of the isolated KSR catalytic domain, which appears to sequester MEK in the cytosol, resulting in the short-circuiting of the signal transduction from Ras to MAPK (Muller et al. (2000), supra).

[0012] Because the Ras pathway has been shown to play a critical role in both normal and abnormal growth processes, it would be desirable to identify and characterize novel components of this pathway. In particular, because KSR has been shown to play a positive role in Ras signaling by coordinating the formation of a multiprotein kinase complex, it would be desirable to identify and characterize novel members of the KSR family.

[0013] Cot (Tp12 in rat), a human protooncogene (Sasai et al. (1993) Br. J. Cancer 67:262-67; Miyoshi et al. (1991) Mol. Cell. Biol. 11:4088-96), is a serine/threonine kinase in the MAP kinase kinase kinase (MAP3K) family (MAP3K8) (Schlesinger et al. (1998) Front. Biosci. 3:D1181-86). Cot expression has been shown to induce ERK and JNK activation (Dumitru et al. (2000) Cell 103:1071-83; Chiariello et al. (2000) Mol. Cell. Biol. 20:1747-58). Similar to Raf, Cot is a MEK-1 kinase upstream of ERK pathway. Overexpression of Cot in CD3-activated T cells leads to IL-2 production, suggesting that Cot may play a role in T cell activation (Ballester et al. (1997) J. Immunol. 159:1613-18; Gilks et al. (1993) Mol. Cell. Biol. 13:1759-68). In addition, Cot has been shown to activate members of the NF-κB family, possibly by activating the IκB kinase (IKK) complex through NF-κB-inducing kinase (NIK) or by inducing the degradation of the inhibitory protein p105 (Kane et al. (2002) Mol. Cell. Biol. 22:5962-74; O'Mahony et al. (2000) Mol. Cell. Biol. 20:1170-78; Salmeron et al. (2001) J. Biol. Chem. 276:22215-22). Recent studies using Cot knockout mice point to a pivotal role of Cot in the LPS-induced production of TNF-α and other proinflammatory cytokines (Dumitru et al. (2000), supra; Eliopoulos et al. (2002) Embo. J. 21:4831-40).

[0014] Despite these various important cellular functions, the precise molecular mechanism of Cot regulation remains unsolved. As activation of both Cot and Raf lead to activation of downstream MAP kinase pathway components, and KSR is believed to function as a regulatory scaffold protein in the Raf/MEK/MAP kinase pathway, it would be desirable to evaluate the functional interrelationship of Cot and novel members of the KSR family.

### SUMMARY OF THE INVENTION

[0015] The invention provides novel isolated protein kinase polypeptides and the isolated nucleic acid molecules that encode them. The invention also provides genetically engineered expression vectors, host cells, and transgenic animals comprising the nucleic acid molecules of the invention. The invention additionally provides antisense and RNA interference (RNAi) molecules to the nucleic acid molecules of the invention. The invention further provides inhibitors, activators, and antibodies capable of binding to the protein kinase polypeptides of the invention. The invention also provides for the regulation of Cot/Tp12-mediated cellular functions, such as ERK and NF-κB activation, as well as IL-8 production, through the use of the nucleic acid and protein kinase polypeptide molecules of the invention.

### BRIEF DESCRIPTION OF THE DRAWINGS

[0016] FIG. 1 shows preferred siRNA molecules targeted to human KSR-2 mRNA for use in RNAi. Target segments [SEQ ID NOs:11-28; 65-93; 152-180; and 239-241] of the KSR-2 transcripts are grouped according to their first two nucleotides (AA, CA, GA, or TA) and are shown in the 5′−>3′ orientation. “GC Ratio” refers to the percentage of total G+C nucleotides in each target segment; “Position” refers to the nucleotide position in the human KSR-2 cDNA (SEQ ID NO:1) immediately preceding the beginning of each target segment. Preferred siRNA molecules (siRNA duplexes) are shown on the right side of the figure. The sense strand for each siRNA duplex [SEQ ID NOs:29-46; 94-122; 181-209; and 242-244] is shown in the 5′−>3′ orientation; the corresponding antisense strand [SEQ ID NOs:47-64; 123-151; 210-238; and 245-247] is shown in the 3′−>5′ orientation. For example, the siRNA molecule directed to the first target segment presented in the figure (i.e., SEQ ID NO:11) is the siRNA duplex of the sense and antisense strands identified (i.e., SEQ ID NO:29 and SEQ ID NO:47, respectively).

[0017] FIG. 2 shows a comparison (ClustalW multiple alignment) of the amino acid sequences of the KSR family members human KSR-2 (hKSR-2) (SEQ ID NO:2), mouse KSR-2 (mKSR-2) (SEQ ID NO:5), human KSR-1 (hKSR-1 [full-length (SEQ ID NO:250) and partial (SEQ ID NO:251)]), mouse KSR-1 (mKSR-1) (SEQ ID NO:252), Drosophila melanogaster KSR (DmKSR) (SEQ ID NO:253), and C. elegans KSR (CeKSR) (SEQ ID NO:254), and the positions of their predicted domains: the KSR-unique CA1 domain, the proline-rich CA2 domain, the cysteine-rich CA3 domain, the serine/threonine-rich CA4 domain, and the kinase catalytic CA5 domain.

### DETAILED DESCRIPTION OF THE INVENTION

[0018] The present invention provides novel isolated and purified polynucleotides and polypeptides homologous to KSR.

[0019] For example, the invention provides purified and isolated polynucleotides encoding a novel KSR (formerly referred to as N.KSR), herein designated “KSR-2.” Preferred DNA sequences of the invention include genomic and cDNA sequences and chemically synthesized DNA sequences.

[0020] The nucleotide sequence of a cDNA encoding this novel KSR, designated human KSR-2 cDNA, is set forth in SEQ ID NO:1. Polynucleotides of the present invention also include polynucleotides that hybridize under stringent conditions to SEQ ID NO:1, or its complement, and/or encode polypeptides that retain substantial biological activity of full-length human KSR-2. Polynucleotides of the present invention also include continuous portions of the sequence set forth in SEQ ID NO:1 comprising at least 21 consecutive nucleotides. A preferred polynucleotide of the present invention comprises the nucleotide sequence of SEQ ID NO:1 from nucleotide 1633 to nucleotide 2421.

[0021] The deduced amino acid sequence of human KSR-2 is set forth in SEQ ID NO:2. Polypeptides of the present invention also include continuous portions of the sequence set forth in SEQ ID NO:2 comprising at least seven consecutive amino acids. A preferred polypeptide of the present invention includes any continuous portion of the sequence set forth in SEQ ID NO:2 that retains substantial biological activity (i.e., an active fragment) of full-length human KSR-2. One such preferred polypeptide comprises the amino acid sequence of SEQ ID NO:2 from amino acid 545 to amino acid 807. Polynucleotides of the present invention also include, in addition to those polynucleotides of human origin described above, polynucleotides that encode the amino acid sequence set forth in SEQ ID NO:2 or a continuous portion thereof, and that differ from the polynucleotides of human origin described above due only to the well-known degeneracy of the genetic code.

[0022] The nucleotide sequence of a genomic DNA encoding this novel KSR, designated human KSR-2 genomic DNA, is set forth in SEQ ID NO:3. Polynucleotides of the present invention also include polynucleotides that hybridize under stringent conditions to SEQ ID NO:3, or its complement, and/or encode polypeptides that retain substantial biological activity of full-length human KSR-2. Polynucleotides of the present invention also include continuous portions of the sequence set forth in SEQ ID NO:3 comprising at least 21 consecutive nucleotides.

[0023] The nucleotide sequence of a cDNA encoding this novel KSR, designated mouse KSR-2 cDNA, is set forth in SEQ ID NO:4. Polynucleotides of the present invention also include polynucleotides that hybridize under stringent conditions to SEQ ID NO:4, or its complement, and/or encode polypeptides that retain substantial biological activity of full-length mouse KSR-2. Polynucleotides of the present invention also include continuous portions of the sequence set forth in SEQ ID NO:4 comprising at least 21 consecutive nucleotides. A preferred polynucleotide of the present invention comprises the nucleotide sequence of SEQ ID NO:4 from nucleotide 1636 to nucleotide 2424.

[0024] The deduced amino acid sequence of mouse KSR-2 is set forth in SEQ ID NO:5. Polypeptides of the present invention also include continuous portions of the sequence set forth in SEQ ID NO:5 comprising at least seven consecutive amino acids. A preferred polypeptide of the present invention includes any continuous portion of the sequence set forth in SEQ ID NO:5 that retains substantial biological activity (i.e., an active fragment) of full-length mouse KSR-2. One such preferred polypeptide comprises the amino acid sequence of SEQ ID NO:5 from amino acid 546 to amino acid 808. Polynucleotides of the present invention also include, in addition to those polynucleotides of murine origin described above, polynucleotides that encode the amino acid sequence set forth in SEQ ID NO:5 or a continuous portion thereof, and that differ from the polynucleotides of murine origin described above only due to the well-known degeneracy of the genetic code.

[0025] The nucleotide sequence of a genomic DNA encoding this novel KSR, designated mouse KSR-2 genomic DNA, is set forth in SEQ ID NO:6. Polynucleotides of the present invention also include polynucleotides that hybridize under stringent conditions to SEQ ID NO:6, or its complement, and/or encode polypeptides that retain substantial biological activity of full-length mouse KSR-2. Polynucleotides of the present invention also include continuous portions of the sequence set forth in SEQ ID NO:6 comprising at least 21 consecutive nucleotides.

[0026] The isolated polynucleotides of the present invention may be used as hybridization probes and primers to identify and isolate nucleic acids having sequences identical to or similar to those encoding the disclosed polynucleotides. Hybridization methods for identifying and isolating nucleic acids include polymerase chain reaction (PCR), Southern hybridizations, and Northern hybridization, and are well known to those skilled in the art.

[0027] Hybridization reactions can be performed under conditions of different stringency. The stringency of a hybridization reaction includes the difficulty with which any two nucleic acid molecules will hybridize to one another. Preferably, each hybridizing polynucleotide hybridizes to its corresponding polynucleotide under reduced stringency conditions, more preferably stringent conditions, and most preferably highly stringent conditions. Examples of stringency conditions are shown in Table 1 below: highly stringent conditions are those that are at least as stringent as, for example, conditions A-F; stringent conditions are at least as stringent as, for example, conditions G-L; and reduced stringency conditions are at least as stringent as, for example, conditions M-R.

| | | | Hybridization | |
|---|---|---|---|---|
| Stringency | Polynucleotide | Hybrid Length | Temperature and | Wash Temperature |
| Condition | Hybrid | (bp)¹ | Buffer² | and Buffer² |
| A | DNA:DNA | >50 | 65° C.; 1X SSC -or- | 65° C.; 0.3X SSC |
| | | | 42° C.; 1X SSC, | |
| | | | 50% formamide | |
| B | DNA:DNA | <50 | T_{B}*; 1X SSC | T_{B}*; 1X SSC |
| C | DNA:RNA | >50 | 67° C.; 1X SSC -or- | 67° C.; 0.3X SSC |
| | | | 45° C.; 1X SSC, | |
| | | | 50% formamide | |
| D | DNA:RNA | <50 | T_{D}*; 1X SSC | T_{D}*; 1X SSC |
| E | RNA:RNA | >50 | 70° C.; 1X SSC | 70° C.; 0.3X SSC |
| | | | -or- | |
| | | | 50° C.; 1X SSC, | |
| | | | 50% formamide | |
| F | RNA:RNA | <50 | T_{F}*; 1X SSC | T_{F}*; 1X SSC |
| G | DNA:DNA | >50 | 65° C.; 4X SSC | 65° C.; 1X SSC |
| | | | -or- | |
| | | | 42° C.; 4X SSC, | |
| | | | 50% formamide | |
| H | DNA:DNA | <50 | T_{H}*; 4X SSC | T_{H}*; 4X SSC |
| I | DNA:RNA | >50 | 67° C.; 4X SSC | 67° C.; 1X SSC |
| | | | -or- | |
| | | | 45° C.; 4X SSC | |
| | | | 50% formamide | |
| J | DNA:RNA | <50 | T_{J}*; 4X SSC | T_{J}*; 4X SSC |
| K | RNA:RNA | >50 | 70° C.; 4X SSC | 67° C.; 1X SSC |
| | | | -or- | |
| | | | 50° C.; 4X SSC, | |
| | | | 50% formamide | |
| L | RNA:RNA | <50 | T_{L}*; 2X SSC | T_{L}*; 2X SSC |
| M | DNA:DNA | >50 | 50° C.; 4X SSC | 50° C.; 2X SSC |
| | | | -or- | |
| | | | 40° C.; 6X SSC, | |
| | | | 50% formamide | |
| N | DNA:DNA | <50 | T_{N}*; 6X SSC | T_{N}*; 6X SSC |
| O | DNA:RNA | >50 | 55° C.; 4X SSC | 55° C.; 2X SSC |
| | | | -or- | |
| | | | 42° C.; 6X SSC, | |
| | | | 50% formamide | |
| P | DNA:RNA | <50 | T_{P}*; 6X SSC | T_{P}*; 6X SSC |
| Q | RNA:RNA | >50 | 60° C.; 4X SSC -or- | 60° C.; 2X SSC |
| | | | 45° C.; 6X SSC, | |
| | | | 50% formamide | |
| R | RNA:RNA | <50 | T_{R}*; 4X SSC | T_{R}*; 4X SSC |
| ¹The hybrid length is that anticipated for the hybridized region(s) of the hybridizing polynucleotides. When hybridizing a polynucleotide to a target polynucleotide of unknown sequence, the hybrid length is assumed to be that of the hybridizing polynucleotide. When polynucleotides of known | | | | |
| # sequence are hybridized, the hybrid length can be determined by aligning the sequences of the polynucleotides and identifying the region or regions of optimal sequence complementarity. | | | | |
| ²SSPE (1xSSPE is 0.15M NaCl, 10 mM NaH₂PO₄, and 1.25 mM EDTA, pH 7.4) can be substituted for SSC (1xSSC is 0.15M NaCl and 15 mM sodium citrate) in the hybridization and wash buffers; washes are performed for 15 min after hybridization is complete. | | | | |
| T_{B}*-T_{R}*: The hybridization temperature for hybrids anticipated to be less than 50 base pairs in length should be 5-10° C. less than the melting temperature (Tₘ) of the hybrid, where Tₘ is determined according to the following equations. For hybrids less | | | | |
| # than 18 base pairs in length, Tₘ(° C.) = 2(# of A + T bases) + 4(# of G + C bases). For hybrids between 18 and 49 base pairs in length, Tₘ(° C.) = 81.5 + 16.6(log₁₀Na⁺) + 0.41(%G⁺C) − (600/N), | | | | |
| # where N is the number of bases in the hybrid, and Na⁺ is the concentration of sodium ions in the hybridization buffer (Na⁺ for 1xSSC = 0.165M). | | | | |
| Additional examples of stringency conditions for polynucleotide hybridization are provided in Sambrook et al., Molecular Cloning: A Laboratory Manual, Chs. 9 & 11, Cold Spring Harbor Laboratory Press, Cold Spring Harbor, NY (1989), and Ausubel et al., eds., Current Protocols in Molecular Biology, | | | | |
| # Sects. 2.10 & 6.3-6.4, John Wiley & Sons, Inc. (1995), herein incorporated by reference. | | | | |

[0028] The isolated polynucleotides of the present invention may be used as hybridization probes and primers to identify and isolate DNAs having sequences encoding allelic variants of the disclosed polynucleotides. Allelic variants are naturally occurring alternative forms of the disclosed polynucleotides that encode polypeptides that are identical to or have significant similarity to the polypeptides encoded by the disclosed polynucleotides. Preferably, allelic variants have at least 90% sequence identity (more preferably, at least 95% identity; most preferably, at least 99% identity) with the disclosed polynucleotides.

[0029] The isolated polynucleotides of the present invention may also be used as hybridization probes and primers to identify and isolate DNAs having sequences encoding polypeptides homologous to the disclosed polynucleotides. These homologs are polynucleotides and polypeptides isolated from a different species than those of the disclosed polypeptides and polynucleotides, or within the same species, but with significant sequence similarity to the disclosed polynucleotides and polypeptides. Preferably, polynucleotide homologs have at least 60% sequence identity (more preferably, at least 75% identity; most preferably, at least 90% identity) with the disclosed polynucleotides, whereas polypeptide homologs have at least 30% sequence identity (more preferably, at least 45% identity; most preferably, at least 60% identity) with the disclosed polypeptides. Preferably, homologs of the disclosed polynucleotides and polypeptides are those isolated from mammalian species.

[0030] The isolated polynucleotides of the present invention may also be used as hybridization probes and primers to identify cells and tissues that express the polypeptides of the present invention and the conditions under which they are expressed.

[0031] Additionally, the isolated polynucleotides of the present invention may be used to alter (i.e., enhance, reduce, or modify) the expression of the genes corresponding to the polynucleotides of the present invention in a cell or an organism. These “corresponding genes” are the genomic DNA sequences of the present invention (e.g., SEQ ID NO:3 and SEQ ID NO:6) that are transcribed to produce the mRNAs from which the cDNA polynucleotides of the present invention (e.g., SEQ ID NO:1 and SEQ ID NO:4) are derived.

[0032] Altered expression of the genes of the present invention in a cell or organism may be achieved through the use of various inhibitory polynucleotides, such as antisense polynucleotides and ribozymes that bind and/or cleave the mRNA transcribed from the genes of the invention (e.g., Galderisi et al. (1999) J. Cell Physiol. 181:251-57; Sioud (2001) Curr. Mol. Med. 1:575-88).

[0033] The antisense polynucleotides or ribozymes of the invention can be complementary to an entire coding strand of a gene of the invention, or to a portion thereof. Alternatively, antisense polynucleotides or ribozymes can be complementary to a noncoding region of the coding strand of a gene of the invention. The antisense polynucleotides or ribozymes can be constructed using chemical synthesis and enzymatic ligation reactions using procedures well known in the art. The nucleoside linkages of chemically synthesized polynucleotides can be modified to enhance their ability to resist nuclease-mediated degradation, as well as to increase their sequence specificity. Such linkage modifications include, but are not limited to, phosphorothioate, methylphosphonate, phosphoroamidate, boranophosphate, morpholino, and peptide nucleic acid (PNA) linkages (Galderisi et al. (1999), supra; Heasman (2002) Dev. Biol. 243:209-14; Micklefield (2001) Curr. Med. Chem. 8:1157-79). Alternatively, these molecules can be produced biologically using an expression vector into which a polynucleotide of the present invention has been subcloned in an antisense (i.e., reverse) orientation.

[0034] The inhibitory polynucleotides of the present invention also include triplex-forming oligonucleotides (TFOs) which bind in the major groove of duplex DNA with high specificity and affinity (Knauert and Glazer (2001) Hum. Mol. Genet. 10:2243-51). Expression of the genes of the present invention can be inhibited by targeting TFOs complementary to the regulatory regions of the genes (i.e., the promoter and/or enhancer sequences) to form triple helical structures that prevent transcription of the genes.

[0035] In a preferred embodiment, the inhibitory polynucleotide of the present invention is a short interfering RNA (siRNA). siRNAs are short (preferably 19-25 nucleotides; most preferably 19 or 21 nucleotides), double-stranded RNA molecules that cause sequence-specific degradation of target mRNA. This degradation is known as RNA interference (RNAi) (e.g., Bass (2001) Nature 411:428-29). Originally identified in lower organisms, RNAi has been effectively applied to mammalian cells and has recently been shown to prevent fulminant hepatitis in mice treated with siRNAs targeted to Fas mRNA (Song et al. (2003) Nature Med. 9:347-51).

[0036] The siRNA molecules of the present invention can be generated by annealing two complementary single-stranded RNA molecules together (one of which matches a portion of the target mRNA) (Fire et al., U.S. Pat. No. 6,506,559) or through the use of a single hairpin RNA molecule which folds back on itself to produce the requisite double-stranded portion (Yu et al. (2002) Proc. Natl. Acad. Sci. USA 99:6047-52). The siRNA molecules can be chemically synthesized (Elbashir et al. (2001) Nature 411:494-98) or produced by in vitro transcription using single-stranded DNA templates (Yu et al. (2002), supra). Alternatively, the siRNA molecules can be produced biologically, either transiently (Yu et al. (2002), supra; Sui et al. (2002) Proc. Natl. Acad. Sci. USA 99:5515-20) or stably (Paddison et al. (2002) Proc. Natl. Acad. Sci. USA 99:1443-48), using an expression vector(s) containing the sense and antisense siRNA sequences. Recently, reduction of levels of target mRNA in primary human cells, in an efficient and sequence-specific manner, was demonstrated using adenoviral vectors that express hairpin RNAs, which are further processed into siRNAs (Arts et al. (2003) Genome Res. 13:2325-32).

[0037] The siRNA molecules targeted to the polynucleotides of the present invention can be designed based on criteria well known in the art (e.g., Elbashir et al. (2001) EMBO J., 20:6877-88). For example, the target segment of the target mRNA preferably should begin with AA (most preferred), TA, GA, or CA; the GC ratio of the siRNA molecule preferably should be 45-55%; the siRNA molecule preferably should not contain three of the same nucleotides in a row; the siRNA molecule preferably should not contain seven mixed G/Cs in a row; and the target segment preferably should be in the ORF region of the target mRNA and preferably should be at least 75 bp after the initiation ATG and at least 75 bp before the stop codon. Based on these criteria, preferred siRNA molecules of the present invention have been designed and are shown in FIG. 1. Other siRNA molecules targeted to the polynucleotides of the present invention can be designed by one of ordinary skill in the art using the aforementioned criteria or other known criteria (e.g., Reynolds et al. (2004) Nature Biotechnol. 22:326-30).

[0038] Altered expression of the genes of the present invention in an organism may also be achieved through the creation of nonhuman transgenic animals into whose genomes polynucleotides of the present invention have been introduced. Such transgenic animals include animals that have multiple copies of a gene (i.e., the transgene) of the present invention. A tissue-specific regulatory sequence(s) may be operably linked to the transgene to direct expression of a polypeptide of the present invention to particular cells or a particular developmental stage. Methods for generating transgenic animals via embryo manipulation and microinjection, particularly animals such as mice, have become conventional and are well known in the art (e.g., Bockamp et al. (2002) Physiol. Genomics 11:115-32).

[0039] Altered expression of the genes of the present invention in an organism may also be achieved through the creation of animals whose endogenous genes corresponding to the polynucleotides of the present invention have been disrupted through insertion of extraneous polynucleotide sequences (i.e., a knockout animal). The coding region of the endogenous gene may be disrupted, thereby generating a nonfunctional protein. Alternatively, the upstream regulatory region of the endogenous gene may be disrupted or replaced with different regulatory elements, resulting in the altered expression of the still-functional protein. Methods for generating knockout animals include homologous recombination and are well known in the art (e.g., Wolfer et al. (2002) Trends Neurosci. 25:336-40).

[0040] The isolated polynucleotides of the present invention may be operably linked to an expression control sequence for recombinant production of the polypeptides of the present invention. General methods of expressing recombinant proteins are well known in the art.

[0041] A number of cell lines may act as suitable host cells for recombinant expression of the polypeptides of the present invention. Mammalian host cell lines include, e.g., COS cells, CHO cells, 293T cells, A431 cells, 3T3 cells, CV-1 cells, HeLa cells, L cells, BHK21 cells, HL-60 cells, U937 cells, HaK cells, Jurkat cells, as well as cell strains derived from in vitro culture of primary tissue and primary explants.

[0042] Alternatively, it may be possible to recombinantly produce the polypeptides of the present invention in lower eukaryotes such as yeast or in prokaryotes. Potentially suitable yeast strains include Saccharomyces cerevisiae, Schizosaccharomyces pombe, Kluyveromyces strains, and Candida strains. Potentially suitable bacterial strains include Escherichia coli, Bacillus subtilis, and Salmonella typhimurium. If the polypeptides of the present invention are made in yeast or bacteria, it may be necessary to modify them by, for example, phosphorylation or glycosylation of appropriate sites, in order to obtain functionality. Such covalent attachments may be accomplished using well-known chemical or enzymatic methods.

[0043] The polypeptides of the present invention may also be recombinantly produced by operably linking the isolated polynucleotides of the present invention to suitable control sequences in one or more insect expression vectors, such as baculovirus vectors, and employing an insect cell expression system. Materials and methods for baculovirus/Sf9 expression systems are commercially available in kit form (e.g., the MaxBac® kit, Invitrogen, Carlsbad, Calif.).

[0044] Following recombinant expression in the appropriate host cells, the polypeptides of the present invention may then be purified from culture medium or cell extracts using known purification processes, such as gel filtration and ion exchange chromatography. Purification may also include affinity chromatography with agents known to bind the polypeptides of the present invention. These purification processes may also be used to purify the polypeptides of the present invention from natural sources.

[0045] Alternatively, the polypeptides of the present invention may also be recombinantly expressed in a form that facilitates purification. For example, the polypeptides may be expressed as fusions with proteins such as maltose-binding protein (MBP), glutathione-S-transferase (GST), or thioredoxin (TRX). Kits for expression and purification of such fusion proteins are commercially available from New England BioLabs (Beverly, Mass.), Pharmacia (Piscataway, N.J.), and Invitrogen, respectively. The polypeptides of the present invention can also be tagged with a small epitope and subsequently identified or purified using a specific antibody to the epitope. A preferred epitope is the FLAG epitope, which is commercially available from Eastman Kodak (New Haven, Conn.).

[0046] The polypeptides of the present invention may also be produced by known conventional chemical synthesis. Methods for chemically synthesizing the polypeptides of the present invention are well known to those skilled in the art. Such chemically synthetic polypeptides may possess biological properties in common with the natural, purified polypeptides, and thus may be employed as biologically active or immunological substitutes for the natural polypeptides.

[0047] The polypeptides of the present invention also encompass molecules that are structurally different from the disclosed polypeptides (e.g., which have a slightly altered sequence), but which have substantially the same biochemical properties as the disclosed polypeptides (e.g., are changed only in functionally nonessential amino acid residues). Such molecules include naturally occurring allelic variants and deliberately engineered variants containing alterations, substitutions, replacements, insertions, or deletions. Techniques for such alterations, substitutions, replacements, insertions, or deletions are well known to those skilled in the art.

[0048] Antibody molecules to the polypeptides of the present invention may be produced by methods well known to those skilled in the art. For example, monoclonal antibodies can be produced by generation of hybridomas in accordance with known methods. Hybridomas formed in this manner are then screened using standard methods, such as enzyme-linked immunosorbent assay (ELISA), to identify one or more hybridomas that produce an antibody that specifically binds with the polypeptides of the present invention. A full-length polypeptide of the present invention may be used as the immunogen, or, alternatively, antigenic peptide fragments of the polypeptides may be used. An antigenic peptide of a polypeptide of the present invention comprises at least seven continuous amino acid residues and encompasses an epitope such that an antibody raised against the peptide forms a specific immune complex with the polypeptide. Preferably, the antigenic peptide comprises at least 10 amino acid residues, more preferably at least 15 amino acid residues, even more preferably at least 20 amino acid residues, and most preferably at least 30 amino acid residues.

[0049] As an alternative to preparing monoclonal antibody-secreting hybridomas, a monoclonal antibody to a polypeptide of the present invention may be identified and isolated by screening a recombinant combinatorial immunoglobulin library (e.g., an antibody phage display library) with a polypeptide of the present invention to thereby isolate immunoglobulin library members that bind to the polypeptide. Techniques and commercially available kits for generating and screening phage display libraries are well known to those skilled in the art. Additionally, examples of methods and reagents particularly amenable for use in generating and screening antibody display libraries can be found in the literature.

[0050] Polyclonal sera and antibodies may be produced by immunizing a suitable subject with a polypeptide of the present invention. The antibody titer in the immunized subject may be monitored over time by standard techniques, such as with ELISA using immobilized marker protein. If desired, the antibody molecules directed against a polypeptide of the present invention may be isolated from the subject or culture media and further purified by well-known techniques, such as protein A chromatography, to obtain an IgG fraction.

[0051] Fragments of antibodies to the polypeptides of the present invention may be produced by cleavage of the antibodies in accordance with methods well known in the art. For example, immunologically active F(ab′) and F(ab′)₂ fragments may be generated by treating the antibodies with an enzyme such as pepsin.

[0052] Additionally, chimeric, humanized, and single-chain antibodies to the polypeptides of the present invention, comprising both human and nonhuman portions, may be produced using standard recombinant DNA techniques. Humanized antibodies may also be produced using transgenic mice which are incapable of expressing endogenous immunoglobulin heavy and light chain genes, but which can express human heavy and light chain genes.

[0053] The polynucleotides and polypeptides of the present invention may also be used in screening assays to identify pharmacological agents or lead compounds for agents capable of modulating KSR-2 activity, either substrate binding and/or kinase activity. Such screening assays are well known in the art (e.g., Xing et al. (2000) J. Biol. Chem. 275:17276-80; Turek et al. (2001) Anal. Biochem. 299:45-53). For example, samples containing KSR-2 (either natural or recombinant) can be contacted with one of a plurality of test compounds (either small organic molecules or biological agents), and the activity of KSR-2 in each of the treated samples can be compared to the activity of KSR-2 in untreated samples or in samples contacted with different test compounds to determine whether any of the test compounds provides: 1) a substantially decreased level of KSR-2 activity, thereby indicating an inhibitor of KSR-2 activity, or 2) a substantially increased level of KSR-2 activity, thereby indicating an activator of KSR-2 activity. In a preferred embodiment, the identification of test compounds capable of modulating KSR-2 activity is performed using high-throughput screening assays, such as provided by BIACORE® (Biacore International AB, Uppsala, Sweden), BRET (bioluminescence resonance energy transfer), and FRET (fluorescence resonance energy transfer) assays, as well as ELISA.

[0054] The present invention is illustrated by the following Examples related to human and mouse cDNAs, designated human KSR-2 cDNA and mouse KSR-2 cDNA, respectively, encoding novel KSR polypeptides designated KSR-2.

### EXAMPLES

[0055] The Examples which follow are set forth to aid in the understanding of the invention but are not intended to, and should not be construed to, limit its scope in any way. The Examples do not include detailed descriptions of conventional methods, such as those employed in the construction of vectors and plasmids, the insertion of genes encoding polypeptides into such vectors and plasmids, the introduction of such vectors and plasmids into host cells, or the expression of polypeptides from such vectors and plasmids in host cells. Such methods are well known to those of ordinary skill in the art and are described in numerous publications.

### Example 1

[0056] Identification of KSR-2 DNA Sequences

### Example 1.1

### Identification of the Human KSR-2 Genomic and cDNA Sequence

[0057] Human KSR-2 was initially predicted by structural-based genome data mining using novel computational techniques based on bioinformatics principles described in Baxevanis and Ouellette, eds., Bioinformatics: A Practical Guide to the Analysis of Genes and Proteins, Wiley InterScience, New York (2001), herein incorporated by reference in its entirety. The hKSR-2 cDNA was derived from genomic database mining using the structural profiles of the catalytic domains of various kinases. To achieve this, all available X-ray crystal structures of the catalytic domains of serine/threonine and tyrosine protein kinases were collected from the SCOP database (http://scop.berkeley.edu). Structural alignments were performed using the ProCeryon package (http://www.proceryon.com). This alignment was converted into a “scoring matrix” which carries the structural profile of the kinase catalytic domains. The structural alignments were presented in the form of multiple sequence alignments, which were used to search the Celera Human Genome Genscan predictions (release R25h) using NCBI's psiblast package. DNA sequences encoding the predicted protein sequences aligning to the scoring matrix were extracted from public human genomic sequence databases, such as Celera and GenBank. The extracted nucleic acid sequences were clustered to eliminate repetitive entries. The putative kinase domains were then sequentially run through a series of queries and filters to identify novel protein kinase sequences. Specifically, the identified sequences were used to search a nucleotide and amino acid repository of known human protein kinases using BLASTN and BLASTX. The output was parsed into a spreadsheet to facilitate elimination of known genes by manual inspection. The selected hits were then queried using BLASTN against the NCBI nr and est databases to confirm their novelty and also to select the closest homologs.

[0058] Extensions of the partial DNA sequences were performed using the Genewise program to predict potential open reading frames based on homology to the closest homologs. Genewise requires two input sequences: the homologous protein and the genomic DNA containing the gene of interest. The homologs were identified by BLASTP searches of the NCBI nr protein database with the novel kinase hits described above. The genomic DNA was identified by BLASTN searches of the Celera and GenBank databases. The extended “virtual” cDNA sequences were then used to isolate the corresponding physical clones from cDNA libraries.

[0059] Based on such a virtual cDNA sequence, a predicted gene, which was homologous to the known human KSR, was identified. This predicted sequence was supported by an expressed sequence tag (EST) clone (BF948353). The EST-supported region was selected as a gene capture oligo for cloning, and two isolates (B11 and F7) were obtained from a human testis cDNA library. The presence of an in-frame stop codon upstream of the predicted initiator methionine argues that this cDNA contains the complete open reading frame (ORF). Based on the multiple sequence alignments of known KSR family members, the N-terminus of B11 and C-terminus of F7 were combined by PCR to obtain a novel cDNA. The novel KSR-like clone was termed human KSR-2. The human KSR-2 cDNA sequence, and its deduced amino acid sequence, are set forth in SEQ ID NOs:1 and 2, respectively. The hKSR-2 cDNA has an ORF of 2487 bp (coding sequence of 2490 bp) that encodes an 829 aa protein kinase. hKSR-2 contains proline-rich CA2, cysteine-rich CA3, serine/threonine repeats and the consensus MAPK phosphorylation site of CA4, and the conserved kinase catalytic domain CA5 (FIG. 2). However, hKSR-2 lacks subdomain CA1, which is a domain unique to the KSR family (Therrien et al. (1995), supra). A murine homolog of hKSR-2 (mKSR-2) was predicted using Genewise software and a cDNA clone was obtained from a mouse kidney cDNA library. The 5893-bp mouse cDNA has 88.9% identity to the hKSR-2 cDNA, and the predicted 830-aa protein has 96.9% identity at the amino acid level with hKSR-2. Northern blot revealed that hKSR-2 is mainly expressed in brain and kidney.

[0060] BLASTP analysis with the deduced amino acid sequence of human KSR-2 (SEQ ID NO:2) revealed significant homology to the kinase domains of KSR from various species, including human KSR-1 (partial—GenBank Acc. No. U43586; and full-length—GenBank Acc. No. CAE84534_{—}1), mouse KSR-1 (GenBank Acc. No. U43585), Drosophila melanogaster KSR (GenBank Acc. No. U43583), Drosophila virilis KSR (GenBank Acc. No. U43584), Drosophila simulans KSR (GenBank Acc. No. AY135139), and C. elegans KSR-1 (GenBank Acc. No. U38820). ClustalW alignment of the deduced amino acid sequences of human KSR-2 and human and mouse KSR-1 (FIG. 2) revealed that human KSR-2, like human KSR-1, contains the proline-rich CA2 domain, the cysteine-rich CA3 domain, the serine/threonine-rich CA4 domain, and the kinase catalytic CA5 domain characteristic of all known KSR proteins (Morrison, supra). Interestingly, KSR-2 lacks the CA1 domain unique to known KSR proteins.

[0061] Comparisons related to the genomic DNA used for the Genewise extension (described above) revealed that the human KSR-2 locus, which maps to human chromosome 12q24.3 (position numbers 117539035-117930464, according to Celera mapping), contains 18 exons and 17 introns (see Table 2, below). The human KSR-2 genomic DNA sequence is set forth in SEQ ID NO:3.

TABLE 2

| Region in | | | Position in |
|---|---|---|---|
| SEQ ID NO: 3 | Sequence Attribute | Length (bp) | SEQ ID NO: 1 |
| 1-2000 | 5′-sequence¹ | 2000 | — |
| 2001-2109 | Exon#1 | 109 | 1-109 |
| 2110-95789 | Intron#1 | 93680 | — |
| 95790-96303 | Exon#2 | 514 | 110-623 |
| 96304-189629 | Intron#2 | 93326 | — |
| 189630-189814 | Exon#3 | 185 | 624-808 |
| 189815-274910 | Intron#3 | 85096 | — |
| 274911-274980 | Exon#4 | 70 | 809-878 |
| 274981-278079 | Intron#4 | 3099 | — |
| 278080-278163 | Exon#5 | 84 | 879-962 |
| 278164-298713 | Intron#5 | 20550 | — |
| 298714-298781 | Exon#6 | 68 | 963-1030 |
| 298782-301993 | Intron#6 | 3212 | — |
| 301994-302118 | Exon#7 | 125 | 1031-1155 |
| 302119-317400 | Intron#7 | 15282 | — |
| 317401-317569 | Exon#8 | 169 | 1156-1324 |
| 317570-325580 | Intron#8 | 8011 | — |
| 325581-325622 | Exon#9 | 42 | 1325-1366 |
| 325623-326274 | Intron#9 | 652 | — |
| 326275-326347 | Exon#10 | 73 | 1367-1439 |
| 326348-330168 | Intron#10 | 3821 | — |
| 330169-330217 | Exon#11 | 49 | 1440-1488 |
| 330218-332068 | Intron#11 | 1851 | — |
| 332069-332436 | Exon#12 | 368 | 1489-1856 |
| 332437-371597 | Intron#12 | 39161 | — |
| 371598-371694 | Exon#13 | 97 | 1857-1953 |
| 371695-372739 | Intron#13 | 1045 | — |
| 372740-372873 | Exon#14 | 134 | 1954-2087 |
| 372874-380695 | Intron#14 | 7822 | — |
| 380696-380827 | Exon#15 | 132 | 2088-2219 |
| 380828-385970 | Intron#15 | 5143 | — |
| 385971-386100 | Exon#16 | 130 | 2220-2349 |
| 386101-387495 | Intron#16 | 1395 | — |
| 387496-387629 | Exon#17 | 134 | 2350-2483 |
| 387630-390085 | Intron#17 | 2456 | — |
| 390086-390089 | Exon#18 | 4 | 2484-2487 |
| 390090-390092 | Stop | 3 | 2488-2890 |
| 390093-392092 | 3′-sequence² | 2000 | — |

¹5′-sequence includes 5′-UTR (untranslated region) and/or genomic sequences
²3′-sequence includes 3′-UTR (untranslated region) and/or genomic sequences

[0062] A search of public single nucleotide polymorphism (SNP) databases revealed that the human KSR-2 locus contains 755 SNPs, only two of which occur in the coding region of human KSR-2 (a C/G transversion at nucleotide position 95833 of SEQ ID NO:3 in exon 2, and an A/G transition at nucleotide position 302028 of SEQ ID NO:3 in exon 7).

### Example 1.2

### Identification of the Mouse KSR-2 cDNA Sequence

[0063] A mouse KSR-2 virtual cDNA was extracted from public murine genomic DNA databases based on the human KSR-2 cDNA and mouse KSR-1 cDNA (GenBank Acc. No. U43585) sequences. This virtual cDNA sequence was used to isolate a physical clone from a mouse kidney library with an open reading frame of 2490 bp (coding sequence of 2493 bp). This mouse KSR-2 cDNA sequence is set forth in SEQ ID NO:4. The deduced amino acid sequence of mouse KSR-2 is set forth in SEQ ID NO:5.

[0064] Like human KSR-2, BLASTP analysis with the deduced amino acid sequence of mouse KSR-2 (SEQ ID NO:5) revealed significant homology to the kinase domains of KSR from various species, including human KSR-1 (GenBank Acc. No. U43586), mouse KSR-1 (GenBank Acc. No. U43585), D. melanogaster KSR (GenBank Acc. No. U43583), D. virilis KSR (GenBank Acc. No. U43584), D. simulans KSR (GenBank Acc. No. AY135139), and C. elegans KSR-1 (GenBank Acc. No. U38820). ClustalW alignment revealed that, like human KSR-2, mouse KSR-2 contains the proline-rich CA2 domain, the cysteine-rich CA3 domain, the serine/threonine-rich CA4 domain, and the kinase catalytic CA5 domain, but lacks the CA1 domain (FIG. 2).

[0065] Comparison of the mouse KSR-2 cDNA sequence with the genomic DNA used to extract the virtual cDNA described above revealed that the mouse KSR-2 locus, which maps to mouse chromosome 5F (position numbers 111593985-111857837, according to Celera mapping), contains 18 exons and 17 introns (see Table 3, below). A comparison of Table 2 and Table 3 shows that exonic size and intronic position are well conserved between the human and mouse KSR-2 genomic DNA sequences. The mouse KSR-2 genomic DNA sequence is set forth in SEQ ID NO:6.

TABLE 3

| Region in | | | Position in |
|---|---|---|---|
| SEQ ID NO: 6 | Sequence Attribute | Length (bp) | SEQ ID NO: 4 |
| 1-2000 | 5′-sequence¹ | 2000 | — |
| 2001-2109 | Exon#1 | 109 | 1-109 |
| 2110-51728 | Intron#1 | 49619 | — |
| 51729-52234 | Exon#2 | 506 | 110-626 |
| 52235-113307 | Intron#2 | 61073 | — |
| 113308-113492 | Exon#3 | 185 | 627-811 |
| 113493-164953 | Intron#3 | 51461 | — |
| 164954-165023 | Exon#4 | 70 | 812-881 |
| 165024-168073 | Intron#4 | 3050 | — |
| 168074-168157 | Exon#5 | 84 | 882-965 |
| 168158-181058 | Intron#5 | 12901 | — |
| 181059-181126 | Exon#6 | 68 | 966-1033 |
| 181127-185150 | Intron#6 | 4024 | — |
| 185151-185275 | Exon#7 | 125 | 1034-1158 |
| 185276-190967 | Intron#7 | 5692 | — |
| 190968-191136 | Exon#8 | 169 | 1159-1327 |
| 191137-198340 | Intron#8 | 7204 | — |
| 198341-198382 | Exon#9 | 42 | 1328-1369 |
| 198383-198850 | Intron#9 | 468 | — |
| 198851-198923 | Exon#10 | 73 | 1370-1442 |
| 198924-202512 | Intron#10 | 3589 | — |
| 202513-202561 | Exon#11 | 49 | 1443-1491 |
| 202562-203758 | Intron#11 | 1197 | — |
| 203759-204126 | Exon#12 | 368 | 1492-1859 |
| 204127-243160 | Intron#12 | 39034 | — |
| 243161-243257 | Exon#13 | 97 | 1860-1956 |
| 243258-244905 | Intron#13 | 1648 | — |
| 244906-245039 | Exon#14 | 134 | 1957-2090 |
| 245040-252539 | Intron#14 | 7500 | — |
| 252540-252671 | Exon#15 | 132 | 2091-2222 |
| 252672-257603 | Intron#15 | 4932 | — |
| 257604-257733 | Exon#16 | 130 | 2223-2352 |
| 257734-259474 | Intron#16 | 1741 | — |
| 259475-259608 | Exon#17 | 134 | 2353-2486 |
| 259609-261846 | Intron#17 | 2238 | — |
| 261847-261850 | Exon#18 | 4 | 2487-2490 |
| 261851-261853 | Stop | 3 | 2491-2493 |
| 261854-263853 | 3′-sequence² | 2000 | — |

¹5′-sequence includes 5′-UTR (untranslated region) and/or genomic sequences
²3′-sequence includes 3′-UTR (untranslated region) and/or genomic sequences

[0066] A search of public SNP databases revealed that the mouse KSR-2 locus contains 287 SNPs, only one of which occurs in the coding region of mouse KSR-2 (a T/C transition at nucleotide position 113353 of SEQ ID NO:6 in exon 3).

### Example 2

[0067] Tissue Expression of the Human KSR-2 Gene

### Example 2.1

### Northern Analysis

[0068] Tissue expression of human KSR-2 was first assessed by Northern analysis using a Clontech Multiple Tissue Northern (MTN) Blot (Palo Alto, Calif.). MTN blots contain approximately 1 μg of polyA⁺ RNA/lane from twelve human tissues. The RNA was run on a denaturing formaldehyde 1.0% agarose gel, transferred to a nylon membrane, and fixed by UV irradiation.

[0069] Based upon the cDNA sequence of human KSR-2 (SEQ ID NO:1), PCR primers were designed to amplify a 333 bp fragment (SEQ ID NO:7) from the human KSR-2 cDNA using PCR. The primers were designed to amplify coding sequence corresponding to exons 8-11 of the human KSR-2 genomic DNA sequence (SEQ ID NO:3), thereby avoiding the highly conserved kinase domain and reducing the possibility of nonspecific hybridization. The sequences of the forward (SEQ ID NO:8) and reverse (SEQ ID NO:9) primers were:

| | |
|---|---|
| 5′ GACCACATCCCTGTCCCTTA 3′ | (forward primer) |
| 5′ CTCCGACGTTGGCTCCACTT 3′ | (reverse primer) |

[0070] The amplified fragment was gel purified and sequence confirmed. The fragment was labeled with [α³²P]dCTP by random priming to produce the Northern probe.

[0071] The MTN blot was hybridized with 1-2×10⁶ cpm/mL ³²P probe in QuickHyb™ buffer (Stratagene, La Jolla, Calif.) along with 150 μg denatured sonicated salmon sperm DNA at 68° C. for 2-4 h. The blot was washed with 2×SSC/1% SDS and 0.1×SSC/1% SDS multiple times at 65° C. Following the washes, the blot was exposed to film for multiple exposures. Smeary high molecular weight bands, which were inconclusive as to the size of the transcripts, were identified mainly in brain and kidney.

### Example 2.2

### Tissue Array Analysis

[0072] The tissue expression of KSR-2 was further analyzed using a Clontech Multiple Tissue Expression (MTE) array. MTE arrays are dot blots containing normalized loadings of polyA⁺ RNA from 72 different human tissues and eight different control RNAs and DNAs.

[0073] The MTE blot was hybridized with 1-2×10⁶ cpm/mL ³²P probe (as described above) in QuickHyb™ buffer along with 150 μg denatured sonicated salmon sperm DNA and 30 μg denatured human Cₒt-1 DNA at 65° C. for approximately 18 h. The blot was washed with 2×SSC/1% SDS and 0.1×SSC/1% SDS multiple times at 65° C. Following the washes, the blot was exposed to film for multiple exposures. The most prominent expression of human KSR-2 was detected in various brain regions, with weaker expression in the lymph node, testis, kidney, and adrenal gland.

### Example 2.3

### Cancer Array Analysis

[0074] The expression of human KSR-2 in various human cancers was assessed using a Clontech Cancer Profiling Array (CPA). CPAs are dot blots of 241 paired cDNA samples from tumor and adjacent normal tissue from individual patients.

[0075] The CPA blot was hybridized with 1-2×10⁶ cpm/mL ³²P probe (as described above) in ExpressHyb™ buffer (Clontech) along with 150 μg denatured sonicated salmon sperm DNA and 30 μg denatured human Cₒt-1 DNA at 65° C. for approximately 18 h. The blot was washed with 2×SSC/1% SDS and 0.1×SSC/1% SDS multiple times at 65° C. Following the washes, the blot was exposed to film for multiple exposures. No obvious differential expression of KSR-2 between normal and tumor tissues was identified.

### Example 3

[0076] Recombinant Expression and Biochemical Analysis of KSR-2

### Example 3.1

### Recombinant Expression of Human KSR-2

[0077] Human KSR-2 was initially predicted by whole genomic data mining using the structural profile of the catalytic domains of various protein kinases (as described above). To isolate the human KSR-2 physical clone, an EST (GenBank Acc. No. BF948353) -supported region of the gene (spanning nucleotides 1095-1324 of SEQ ID NO:1) was used as a gene capture oligonucleotide for cloning. Two overlapping partial cDNA clones (F7 and B11) were isolated from a human testis Marathon-Ready cDNA library (Clontech). The full-length KSR-2 was generated by combining the two partial cDNA clones in a PCR reaction. The resulting full-length sequence was cloned into pENTR/SD-TOPO (Invitrogen). The FLAG epitope, DYKDDDDK (SEQ ID NO:10), was incorporated at the 3′ end of KSR-2 by PCR. The resulting product, termed hKSR-2-FLAG, was cloned into pcDNA-DEST-40 (Invitrogen) for mammalian expression. Similarly, the catalytic domain of KSR-2 (spanning amino acids 543-829 of SEQ ID NO:2) was generated with the FLAG epitope at its 3′ end (termed KSR-2-CD-FLAG) using PCR primers spanning the lysine residue at position 527 (5′-CACCATGGAGCAGCTGGAGATCGGCGAGCTCATT) (SEQ ID NO:248) and the FLAG tag sequence incorporated at the carboxyl terminus (3 ′-CTTCAGACGTCTCATGATGTTCCTACTGCTGCTATTCATCCGCGGCG) (SEQ ID NO:249) and the full-length KSR-2 as template DNA, and cloned into pcDNA-DEST-40 for mammalian expression.

[0078] 293T cells (maintained in DMEM supplemented with 10% fetal bovine serum, 2% L-glutamine, and 1% penicillin/streptomycin) in logarithmic phase were transfected with 10 μg KSR-2-FLAG or KSR-2-CD-FLAG by calcium phosphate precipitation (ProFection™ Mammalian Transfection Systems, Promega, Madison, Wis.) as per the manufacturer's instructions. Untransfected cells served as a control. Cells were lysed in buffer containing protease and phosphatase inhibitors (0.2% NP-40, 25 mM Tris-HCl, pH 7.5, 150 mM NaCl, 1 mM DTT, 1 mM EDTA, 1 mM EGTA, 20 mM NaF, 1 mM Na₃VO₄, 1 mM glycerophosphate, and protease inhibitors) 48 h posttransfection. Cell lysates containing 50 μg protein were diluted in Laemmli buffer containing 2% b-mercaptoethanol and separated by SDS-PAGE on 4-7% polyacrylamide gels. The separated proteins were transferred to nitrocellulose membranes (Invitrogen) using a wet transfer electroblotter (Invitrogen). Following blocking overnight in 5% dry milk at room temperature, the membranes were probed with an anti-FLAG antibody (Eastman Kodak, New Haven, Conn.) at recommended dilution. Immunoreactive bands were detected using appropriate secondary antibodies conjugated to horseradish peroxidase (Amersham Biosciences, Piscataway, N.J.) at recommended dilution. Membranes were visualized using ECL Western Blotting Detection Reagents (Amersham). A band of ˜105 kDa was detected in lysates of cells transfected with KSR-2-FLAG, while a band of ˜37 kDa was detected in cells transfected with KSR-2-CD-FLAG. No bands were detected in untransfected cells.

### Example 3.2

### Identification of Proteins that Interact with KSR-2

[0079] To identify proteins that interact with human KSR-2, 293T cells were transfected with KSR-2-FLAG as described above. Cells transfected with FLAG vector alone served as a control. Cells were lysed as described above 48 h posttransfection. Protein concentrations were determined using the BCA protein assay. Cell lysates containing approximately 1 mg protein were subjected to anti-FLAG antibody immunoprecipitation followed by electrophoresis on a 2D gel resolved in only one dimension. The proteins were then transferred to nitrocellulose membranes and probed with various commercially available antibodies (Cell Signaling Technology, Beverly, Mass.) using the MN20SL Miniblotter (Immunetics, Cambridge, Mass.). Human KSR-2 was found to interact with P.ERK, MEK, P.MEK1, and P.Raf, proteins previously reported to interact with KSR (see Morrison, supra). Interestingly, KSR-2 also interacted with JNK, P.JNK, Cot/Tp12, and IRAK1, interactions that have not previously been reported for KSR. Probing of mock-transfected cells revealed no corresponding bands, indicating that the interactions between human KSR-2 and the above-mentioned proteins are specific. Human KSR-2 did not interact with ERK, P.P38, P.SEK1, or Myd 88.

### Example 3.3

### Human KSR-2 Specifically Interacts with Cot/Tp12 Through its Putative Kinase Domain

[0080] Because Cot/Tp12 is an oncogenic MAP kinase kinase kinase (MAP3K) that activates the MAPK pathway (Tsatsanis and Spandidos, Int. J. Mol. Med., 5:583 (2000)), the interaction of human KSR-2 with Cot/Tp12 was further assessed by cotransfecting 293T cells with a full-length Cot/Tp12 expression vector and KSR-2-FLAG or KSR-2-CD-FLAG as described above. Untransfected cells and cells transfected with single vectors served as controls. Cell lysates were subjected to either anti-Cot (Santa Cruz Biotechnology, Santa Cruz Calif.) or anti-FLAG antibody immunoprecipitation followed by SDS-PAGE. Proteins were transferred to nitrocellulose membranes and detected by reciprocal immunodetection (i.e., anti-Cot/Tp12 immunoprecipitation membranes were probed with anti-FLAG antibody, and anti-FLAG immunoprecipitation membranes were probed with anti-Tp12 antibody). Probing of anti-Cot/Tp12-immunoprecipitated lysates with anti-FLAG revealed either a ˜105 kD band corresponding to full-length human KSR-2 or a ˜37 kD band corresponding to the putative kinase domain of human KSR-2, indicating that KSR-2 interacts with Cot/Tp12 through its carboxy terminus. Similar results were obtained when anti-FLAG-immunoprecipitated lysates were probed with anti-Cot/Tp12 (a ˜50 kD band corresponding to Cot/Tp12 was identified). Truncation of the C-terminal 71 amino acids of Cot/Tp12 had no effect on its interaction with KSR-2. Probing of control lysates revealed no corresponding bands, indicating that the interaction between human KSR-2 and Cot/Tp12 is specific.

### Example 3.4

### Human KSR-2 Inhibits the Kinase Activity of Cot/Tp12

[0081] To determine the effect of KSR-2 on the kinase activity of Cot/Tp12, an in vitro kinase assay was performed using anti-FLAG-immunoprecipitated KSR-2 and purified recombinant Cot/Tp12. Following transfection of 293T cells with human KSR-2-FLAG, cell lysates were prepared as described above and subjected to immunoprecipitation using anti-FLAG and 20 μl 50% GammaBind Plus Sepharose beads (Amersham) that had been prewashed in lysis buffer. Bead bound-KSR-2 was eluted using competing FLAG peptide. The eluted KSR-2 was incubated with recombinant Cot/Tp12 or Raf enzyme (Upstate Biotechnology, Inc., Lake Placid, N.Y.) and 100 nM inactive GST-MEK1-His6 as substrate in kinase buffer (20 mM MOPS (pH. 7.2), 100 μM ATP, 5 mM EGTA, 20 mM MgCl₂, and protease and phosphatase inhibitors) in the presence of 5 μCi [γ-³³P] ATP. Various control kinase reactions were performed using the same buffer mix. Following 30 min at 30° C., the kinase reactions were stopped by the addition of LDS loading buffer (Invitrogen). The samples were boiled, centrifuged, and separated on a denaturing SDS-PAGE gel, and the radiolabeled proteins were visualized using the Molecular Imager FX (Bio-Rad, Hercules, Calif.). KSR-2 reduced Cot/Tp12 kinase activity in a dose-dependent manner, whereas Raf kinase activity was upregulated, indicating that KSR-2 selectively blocks Cot/Tp12-induced MEK phosphorylation, but not Raf-mediated MEK phosphorylation, in this system.

### Example 3.5

### Human KSR-2 Attenuates Cot/Tp12-Induced ERK Activation

[0082] To assess the downstream biological effects of the interaction between human KSR-2 and Cot/Tp12, 293T cells were cotransfected with Cot/Tp12 and KSR-2-FLAG or KSR-2-CD-FLAG expression vectors as described above. Untransfected cells served as a control. Following SDS-PAGE and blotting as described above, the membranes were probed with a polyclonal anti-P.ERK antibody (Cell Signaling Technology) at recommended dilution. No P.ERK was detected in cells transfected with hKSR-2-FLAG or hKSR-2-CD-FLAG alone, indicating that neither KSR-2 nor its putative kinase domain have any appreciable ERK activation potential. Cells transfected with Cot/Tp12 contained a very intense 42/44 kDa P.ERK doublet compared to untransfected cells, indicating that Cot/Tp12 activates ERK to P.ERK. Cotransfection of these cells with KSR-2-FLAG or KSR-2-CD-FLAG, however, reduced the intensity of the P.ERK doublet by ˜83%, indicating that KSR-2 blocks Cot/Tp12-mediated ERK activation. Coexpression of KSR-2 did not, however, affect Raf-mediated ERK activation, indicating that KSR-2 specifically inhibits only Cot/Tp12-mediated ERK activation. To rule out the possibility that the inhibitory effect on Cot/Tp12 by KSR-2 was due to its overexpression, hKSR-2 concentrations were titrated down while Cot/Tp12 levels remained constant. A dramatic decrease in the levels of Cot-induced ERK activation by KSR-2 was demonstrated in a dose-dependent manner. Consequently, KSR-2 inhibition of Cot/Tp12 is not an artifact of transient transfections.

### Example 3.6

### Human KSR-2 Blocks Cot/Tp12-Induced NF-κB Activation

[0083] Cot/Tp12 is reported to regulate NF-κB activation, either by targeting the IκB kinase (IKK) complex through the intermediate kinase NF-κB-inducing kinase (NIK) (Lin et al., Immunity, 10:271 (1999)) or by direct targeting and proteolysis of NF-κB inhibitory protein, p105 (Salmeron et al., J. Biol. Chem., 276:22215 (2001); Belich et al., Nature, 397:363 (1999)). To determine what role KSR-2 plays in this pathway, 293T cells containing a NF-κB/luciferase reporter plasmid (Promega, Madison, Wis.) were cotransfected with Cot/Tp12 and hKSR-2-FLAG or hKSR-2-CD-FLAG expression vectors (2.5-5 μg DNA/well of a 24-well plate, or 5-7 μg of DNA/well of 6-well plate) as described above. Cells transfected with single vectors served as controls. Cells were lysed 48 h posttransfection in 1× passive lysis buffer from the Dual-Luciferase Reporter Assay System (Promega). Twenty μl of cell lysate was transferred to 96-well plates (Lab Systems, Franklin, Mass.) specifically designed for luciferase assays. The Fluoroscan Ascent FL luminometer (Lab Systems) was programmed to perform a 2 sec premeasurement followed by a 10 sec reading of luciferase activity. Results were normalized using the renilla luciferase reporter plasmid pRL-TK supplied with the assay system. Cot/Tp12 alone strongly induced NF-κB-dependent luciferase activity (˜5- to 6-fold), whereas neither KSR-2 nor its putative kinase domain showed any NF-κB activation potential. Coexpression of Cot/Tp12 with KSR-2 or its putative kinase domain, however, blocked Cot/Tp12-induced NF-κB activation by ˜90%, indicating that KSR-2 is able to block Cot/Tp12-mediated cellular functions. Additionally, KSR-2 was able to reduce Cot/Tp12-mediated NF-κB levels in a dose-dependent manner, suggesting that KSR-2 inhibition of Cot/Tp12 is not an artifact of transient transfections.

### Example 3.7

### Human KSR-2 Blocks Cot/Tp12-Induced NF-κB Activation Independent of IKKβ

[0084] The specificity of the ability of KSR-2 to block Tp12-induced NF-κB activation was assessed in 293T cells containing a NF-κB/luciferase reporter plasmid cotransfected with IKKβ and hKSR-2-FLAG or hKSR-2-CD-FLAG expression vectors as described above. Measurement of luciferase activity (described above) revealed that IKKβ alone strongly induced NF-κB-dependent activation, whereas neither coexpression of IKKβ with KSR-2 nor with its putative catalytic domain had any effect on IKKβ-induced NF-κB activation. These results demonstrate the specificity of the observed Cot/Tp12 inhibition by KSR-2 in Example 3.6, and suggest that this inhibition is independent of the IKKβ signaling pathway.

### Example 3.8

### Human KSR-2 Attenuates Cot/Tp12-Induced IL-8 Production

[0085] Consistent with its ability to activate NF-κB, Cot/Tp12 has been shown in Tp12 knockout mice to regulate the production of various proinflammatory cytokines in monocytes and macrophages, including TNF-α, IL-1, and IL-6 (Elipoulos et al., EMBO J., 21:4831 (2002); Dumitru et al., Cell, 103:1071 (2000)). To assess the effect of KSR-2 on the ability of Cot/Tp12 to induce production of proinflammatory cytokines, HeLa cells (maintained as described above for 293T cells) were transfected with Cot/Tp12 and hKSR-2-FLAG or hKSR-2-CD-FLAG expression vectors using Fugene 6 (Roche, Indianapolis, Ind.) as per manufacturer's recommendations. Cells were either left untreated or treated with 100 ng/ml human recombinant TNF-α (R&D Systems, Minneapolis, Minn.) 48 h posttransfection. During treatments, cells were changed from DMEM containing 10% fetal bovine serum to DMEM containing 0.5% fetal bovine serum. The culture medium was collected 48 h posttransfection or posttreatment and frozen at −80° C. until further use. Cytokine levels were measured by using various ELISA kits from Biosource International (Carlsbad, Calif.) as per manufacturer's instructions. Depending on the initial observation, TNF-α-treated samples were diluted 5-fold in diluent buffer provided in the kit. Assays were run in duplicates, and samples were read at 450 nm in an ELISA plate reader (Wallac 1420 Multilable Counter, Perkin Elmer Life Sciences, Turku, Finland). Cytokine concentrations were determined by comparison to standards with a two-parameter curve fit analysis, with the dilution factor taken into account.

[0086] HeLa cells transfected with Cot/Tp12 exhibited a significant increase in IL-8 production, compared to untransfected cells. This is consistent with previous reports that the MAPK and NF-κB pathways are involved in IL-8 production (Neff et al., Cell. Microbiol., 3:703 (2001)). Transfection of Cot/Tp12 did not cause any increase in TNF-α, IL-1, or IL-6 production, suggesting that HeLa cells and monocytes and macrophages use different pathways for cytokine production. The Cot/Tp12-induced production of IL-8 was markedly reduced by coexpression of KSR-2. Although TNF-α treatment increased IL-8 production to an even greater extent in Cot/Tp12-transfected cells than in untreated transfected cells, coexpression of KSR-2 had no effect on the TNF-α-induced IL-8 production, suggesting that the Cot/Tp12 pathway may be independent of the TNF-α pathway.

[0087] To determine the specificity of IL-8 inhibition by KSR-2, the effect of KSR-2 on TAK1/TAB1-induced IL-8 production was assessed. In addition to Cot/Tp12, another major mechanism contributing to IL-8 gene expression is linked to TAK1, another MAP3K, and its coactivator TAB1 (Holtmann et al. (2001) J. Biol. Chem. 276:3508-16). Cotransfection of TAK1 and TAB1 expression vectors into HeLa cells resulted in a significant increase in IL-8 production. Coexpression of KSR-2 with TAK1/TAB1, however, had no effect on the increased IL-8 production, demonstrating that KSR-2 specifically inhibits only Cot/Tp12-induced IL-8 production.

[0088] Taken together, the results provide evidence for a novel regulatory role for KSR-2 in the inhibition of Cot/Tp12-mediated cellular functions, such as ERK and NF-κB activation, as well as IL-8 production. The results also suggest that KSR, a scaffold protein, may have dual regulatory roles, functioning as a positive or negative regulatory protein depending upon its protein targets.

What is claimed is:

1. An isolated nucleic acid molecule having the nucleotide sequence of SEQ ID NO:1.

2. An isolated nucleic acid molecule having the nucleotide sequence of SEQ ID NO:4.

3. The isolated nucleic acid molecule of claim 1 wherein said nucleic acid molecule is operably linked to at least one expression control sequence.

4. A host cell transformed or transfected with the nucleic acid molecule of claim 3.

5. The isolated nucleic acid molecule of claim 2 wherein said nucleic acid molecule is operably linked to at least one expression control sequence.

6. A host cell transformed or transfected with the nucleic acid molecule of claim 5.

7. An isolated nucleic acid molecule that specifically hybridizes under highly stringent conditions to the nucleotide sequence set forth in SEQ ID NO:1 or to the complement of the sequence set forth in SEQ ID NO:1.

8. An isolated nucleic acid molecule that specifically hybridizes under highly stringent conditions to the nucleotide sequence set forth in SEQ ID NO:4 or to the complement of the sequence set forth in SEQ ID NO:4.

9. An isolated nucleic acid molecule that encodes a protein having the amino acid sequence of SEQ ID NO:2.

10. An isolated nucleic acid molecule that encodes a protein having the amino acid sequence of SEQ ID NO:5.

11. An antisense oligonucleotide complementary to a mRNA corresponding to a nucleic acid molecule having the nucleotide sequence of SEQ ID NO:1, wherein said oligonucleotide inhibits production of KSR-2.

12. An antisense oligonucleotide complementary to a mRNA corresponding to a nucleic acid molecule having the nucleotide sequence of SEQ ID NO:4, wherein said oligonucleotide inhibits production of KSR-2.

13. An isolated gene having the nucleotide sequence of SEQ ID NO:3.

14. An isolated gene having the nucleotide sequence of SEQ ID NO:6.

15. An isolated allele of a nucleic acid molecule having the nucleotide sequence of SEQ ID NO:1.

16. An isolated allele of a nucleic acid molecule having the nucleotide sequence of SEQ ID NO:3.

17. An isolated allele of a nucleic acid molecule having the nucleotide sequence of SEQ ID NO:4.

18. An isolated allele of a nucleic acid molecule having the nucleotide sequence of SEQ ID NO:6.

19. An isolated protein having the amino acid sequence of SEQ ID NO:2, or an active fragment thereof.

20. An isolated protein having the amino acid sequence of SEQ ID NO:5, or an active fragment thereof.

21. An isolated antibody capable of binding to the protein of claim 19.

22. An isolated antibody capable of binding to the protein of claim 20.

23. A nonhuman transgenic animal in which all of the somatic and germ cells contain DNA comprising a nucleic acid molecule having the nucleotide sequence of SEQ ID NO:1.

24. A nonhuman transgenic animal in which all of the somatic and germ cells contain DNA comprising a nucleic acid molecule having the nucleotide sequence of SEQ ID NO:3.

25. A method of inhibiting Cot/Tp12-induced ERK activation in a cell population comprising transforming or transfecting said cell population with the nucleic acid molecule of claim 3.

26. A method of inhibiting Cot/Tp12-induced ERK activation in a cell population comprising transforming or transfecting said cell population with the nucleic acid molecule of claim 5.

27. A method of inhibiting Cot/Tp12-induced NF-κB activation in a cell population comprising transforming or transfecting said cell population with the nucleic acid molecule of claim 3.

28. A method of inhibiting Cot/Tp12-induced NF-κB activation in a cell population comprising transforming or transfecting said cell population with the nucleic acid molecule of claim 5.

29. A method of inhibiting NF-κB-mediated gene expression in a cell population comprising transforming or transfecting said cell population with the nucleic acid molecule of claim 3.

30. A method of inhibiting NF-κB-mediated gene expression in a cell population comprising transforming or transfecting said cell population with the nucleic acid molecule of claim 5.

31. A method of inhibiting IL-8 production in a cell population comprising transforming or transfecting said cell population with the nucleic acid molecule of claim 3.

32. A method of inhibiting IL-8 production in a cell population comprising transforming or transfecting said cell population with the nucleic acid molecule of claim 5.

33. A method of inhibiting expression of KSR-2 in a cell population comprising treating said cell population with the antisense oligonucleotide of claim 11.

34. A method of inhibiting expression of KSR-2 in a cell population comprising treating said cell population with the antisense oligonucleotide of claim 12.

35. A method of identifying a compound capable of inhibiting the activity of a KSR-2 protein comprising the steps of:
(a) contacting a first sample containing the KSR-2 protein with one of a plurality of test compounds; and
(b) comparing the activity of the KSR-2 protein in the first contacted sample with that of the KSR-2 protein in a second sample not contacted with the test compound,
wherein a decrease in the activity of the KSR-2 protein in the first sample, as compared with that in the second sample, identifies the compound as an inhibitor of KSR-2 protein activity.

36. The method of claim 35, wherein the KSR-2 protein is the protein of claim 19.

37. The method of claim 35, wherein the KSR-2 protein is the protein of claim 20.

38. A method of identifying a compound capable of increasing the activity of a KSR-2 protein comprising the steps of:
(a) contacting a first sample containing the KSR-2 protein with one of a plurality of test compounds; and
(b) comparing the activity of the KSR-2 protein in the first contacted sample with that of the KSR-2 protein in a second sample not contacted with the test compound,
wherein an increase in the activity of the KSR-2 protein in the first sample, as compared with that in the second sample, identifies the compound as an activator of KSR-2 protein activity.

39. The method of claim 38, wherein the KSR-2 protein is the protein of claim 19.

40. The method of claim 38, wherein the KSR-2 protein is the protein of claim 20.

41. A method of inhibiting expression of KSR-2 in a cell population comprising treating said cell population with a siRNA molecule targeted to a mRNA corresponding to the isolated nucleic acid molecule of claim 1.

42. The method of claim 41, wherein the siRNA molecule is selected from the group consisting of siRNA molecules shown in FIG. 1.

43. A method of inhibiting expression of KSR-2 in a cell population comprising treating said cell population with a siRNA molecule targeted to a mRNA corresponding to the isolated nucleic acid molecule of claim 2.

44. A siRNA molecule that inhibits the expression of KSR-2.

45. A siRNA molecule of claim 44, wherein the siRNA molecule is selected from the group consisting of siRNA molecules shown in FIG. 1.

The application's sequence listing, which the Patent Office published only in electronic form, follows.

SEQUENCE LISTING (254 sequences)

SEQ ID NO: 1 - DNA, 2490 bp, Homo sapiens
  CDS (1)..(2487)
atgacggatgaacaggtgtgcgagactgtggagaaatacggagccaaccgggaggagtgtgcccgcctcaacgcctccctctcctgcctcaggaatgtccacatgtcaggaggcaacctttccaaacaagactggaccatccagtggcccaccacagagacggggaaggagaacaatcccgtgtgccccccggagcccaccccgtggatccgcacccatctctcccagagccccagggtcccgtccaagtgcgtccagcactattgtcacaccagccccactcccggggcccctgtgtacacccacgtggacaggcttaccgtggacgcctacccgggcttgtgcccgcccccgccactggagtcgggccaccgttccctgcccccatcgccccggcagcggcacgcggtccgcaccccgccgcgcacccccaacatcgtcaccaccgtgaccccgccgggcacgccgcccatgaggaagaagaacaagctgaagcccccggggaccccaccgccctcctcccgaaaactgatacacttgatcccgggattcaccgcgctgcatcggagcaaatcccacgagttccagctggggcaccgcgtggacgaggcccacacgcccaaagccaagaagaagagcaaacccttgaacctcaagatccacagcagcgtaggcagctgcgagaacatcccctctcagcagcgctccccgctgctgtccgagcgctccctccgctccttctttgtgggacacgcacctttcctgccttccacccctcctgttcacactgaggccaacttctctgcaaacacactgtcagtgccacgctggtccccgcagatccctcgcagagatctcggcaactccatcaagcacaggttttccaccaagtactggatgtctcagacgtgcacagtctgtgggaaagggatgctttttggcctcaagtgtaaaaactgcaagttaaagtgccacaacaaatgcaccaaagaagccccaccctgtcatcttctgatcatccaccgaggagatccagcaaggttagtccggacagagtccgttccgtgtgacatcaacaaccctctacggaagccacctcgctattcagacctgcacatcagtcagacgctccccaaaaccaacaaaatcaacaaggaccacatccctgtcccttaccagccagactccagcagcaacccctcctccacgacgtcctccacgccctcctcgccagcaccccccctccctcctagtgccacgccgccttctcccctacacccttccccacagtgcacacggcagcagaagaacttcaacctgccagcatcccactactacaaatacaagcagcagttcatcttcccagatgtggtgccggtgccggagacgccgacccgggcgccccaggtcatcctgcatccggtgacctcgaatccaatcttggaaggaaatccattacttcaaattgaagtggagccaacgtcggagaatgaagaggtccatgatgaggccgaagagtcagaggatgacttcgaggagatgaacctgtccctcctctcggcccggagcttcccacgcaaggccagccagaccagcatcttccttcaggagtgggacatcccctttgagcagctggagatcggcgagctcattggaaagggccgctttgggcaagtgtaccacggccgctggcatggcgaggtggccatccggctgattgacattgagagggacaacgaggaccagctcaaggccttcaagcgggaggtgatggcctacaggcagacacggcatgagaacgtggtgcttttcatgggtgcctgcatgagcccgcctcacctggccatcatcaccagcctctgtaagggacggacgctctattccgttgtgagggatgccaaaatcgttttggatgtcaacaaaaccaggcagattgctcaagaaattgtgaagggcatgggctacctccacgccaagggaatcctacacaaggacctcaagtcaaagaacgtcttctatgacaacggcaaagtggtcatcacggactttggactcttcagcatttctggggtgctgcaggctggcaggcgggaggacaaactgcgcatccagaatggctggctatgccacctggcaccagagatcatccgccagctgtcccccgacacagaggaggataagctccccttctccaagcactctgacgtctttgcccttggcacaatctggtatgaactccacgccagggaatggcctttcaagacccaaccagcagaggcaataatctggcaaatgggcacaggcatgaaacccaacctcagccagattggcatgggaaaagaaatctcggacattcttctcttctgctgggcctttgaacaagaagagagacctaccttcaccaagctcatggacatgctggagaaactgccaaagcgaaaccgtcgcctgtctcaccctggacatttctggaagtctgcagagctgtga

SEQ ID NO: 2 - protein, 829 aa, Homo sapiens
MTDEQVCETVEKYGANREECARLNASLSCLRNVHMSGGNLSKQDWTIQWPTTETGKENNPVCPPEPTPWIRTHLSQSPRVPSKCVQHYCHTSPTPGAPVYTHVDRLTVDAYPGLCPPPPLESGHRSLPPSPRQRHAVRTPPRTPNIVTTVTPPGTPPMRKKNKLKPPGTPPPSSRKLIHLIPGFTALHRSKSHEFQLGHRVDEAHTPKAKKKSKPLNLKIHSSVGSCENIPSQQRSPLLSERSLRSFFVGHAPFLPSTPPVHTEANFSANTLSVPRWSPQIPRRDLGNSIKHRFSTKYWMSQTCTVCGKGMLFGLKCKNCKLKCHNKCTKEAPPCHLLIIHRGDPARLVRTESVPCDINNPLRKPPRYSDLHISQTLPKTNKINKDHIPVPYQPDSSSNPSSTTSSTPSSPAPPLPPSATPPSPLHPSPQCTRQQKNFNLPASHYYKYKQQFIFPDVVPVPETPTRAPQVILHPVTSNPILEGNPLLQIEVEPTSENEEVHDEAEESEDDFEEMNLSLLSARSFPRKASQTSIFLQEWDIPFEQLEIGELIGKGRFGQVYHGRWHGEVAIRLIDIERDNEDQLKAFKREVMAYRQTRHENVVLFMGACMSPPHLAIITSLCKGRTLYSVVRDAKIVLDVNKTRQIAQEIVKGMGYLHAKGILHKDLKSKNVFYDNGKVVITDFGLFSISGVLQAGRREDKLRIQNGWLCHLAPEIIRQLSPDTEEDKLPFSKHSDVFALGTIWYELHAREWPFKTQPAEAIIWQMGTGMKPNLSQIGMGKEISDILLFCWAFEQEERPTFTKLMDMLEKLPKRNRRLSHPGHFWKSAEL

SEQ ID NO: 3 - DNA, 392112 bp, Homo sapiens
aaaaatgttacttttatgatttttttctgaacttaagctttagagtaaattgaaatatatacatatataaatcataagattaaaatgcacaagtgaatcctgaagcaaagaggagaatccttttatgttatgaatcacccccttcaaacatgagtcattctgtaccttcagatcctggactgggtgcagtggctcaagtccgtaatctcagcacttttggaaaccgaggtgggaggatcacttgaggccaggaattcgagaccagcctgggcaacatagtgagatcctatctctacaaaaaaatttaaaaattagccaggcatgttggtgcatgcctgtagtcccagctactcaggagactgaggtgggagggtcgcttgaacccaggagtttgaggctgcagtgagatatgatggcctcactgcaccccagcctggtgacagagggagaccctgtctctatttaagaaaaacaacaaccagaaataaacagatccgtggtcatcacctttcttaaaggggctcaccagcaatgtgtccctatttgagaaagcctctaagtgactccactattcttctctctctgccccctgcctgcctgggtgagttgaaaaggcaccatagctcatatttttgaagataattttttgtactgagacagttttcttctttctggctatcagtttaatgtgggagctgtatcttgttgtaatacacaaacatgaccacaagagggtagatgtattccgcaatactgccctagaaacaccatccgtaggctatttcacccttatttactttcggaggctgaggtgggcagatcacctgaggtcaggagtttgagaccagcctggccaacatggtgaaaccctgtctctactaaaaatacaaaaattagccaggcgtggtggtgagtggctgtaatcctagctacttaggaggctgaggcaggagaatcgcttgaacccgggaggtggatgttgcagtgagccgagatcgcgccattgcactccagcctgggaaacaagagcgagactgtctcaaaacaaacaaacaaataaacaaaaaacaaaaaaaggcaaaaaacccttaagtaataacaatatatgttaaaatgttgagtagtaagtgctataaaagaagactcatatatacatacagatactgatgcataaatatagaagcttgacaaattttgaggtgtgtccatatgatggtctagggagacactgttttgggaacatggggtggcggtgaaagttcacctgcccaacacgttaagttgggaatcctaccttttctaggtccctttcccccactccacgctatactccagtgtttctgctttgccttaggatgcaaagccatgccccatggggctcaaaaacaaacctagtttcatttccagcacggggcatggactttcagccccttttccattagggtttctgaagaccagtgtgagccctagaccctgcagccagagaagagaggaagcagagagagagtgggacccagccaccagcacacctgccttgtcctgtgcttgctctgagtttgtgctgggattttagatgagtccctgcagagtgggaggcactgagagccaagcaaacatgaaaaaatggggccctgccttataaacattcgagagacaggcacagtgttgacgccagacagggtagtaattataatagcactaagcacctgcgctaccttgccaagtatggacacttaggagtcccactttacagatgagcaaagtgaggcccagagaggttgagcgactggtcagaggttatctagataatgagtggcaaacccgagattcggagaccccactgtcatgcaaagcgtttacactgcggagtgttctcctctaggcaccactacagggcagcgtggaggcagagatgctgttcctgccccacggttgacaatccttctcccctcctctaggaaatctcccccggccagctgagcctggaggacctcttggagatgacggatgaacaggtgtgcgagactgtggagaaatacggagccaaccgggaggagtgtgcccgcctcaacgcctccctctcctgcctcaggaatgtccacatgtcaggtgagcaggccccggggtcggggatgtggagacttgtccccagcacagctgccgcggtccctcggcatcccgtgcccgccactgcaggccaggacgagacagagtcaaccctggggggcaaatccgaaacgcaggaagaggcagcgtggacctgggatttggaggccggaagacaccagcaagggcagctcttggatttgaactcttgccccaggaagacccgctgaggtttagggtatctggttctggataattagggtccagatatgaaaatattgagtgtgaataggagaccagggtctttttactttagacattctgacgtggctttgcattttgggtcaatgtctagcttctaattttttttttaacagaagtaatttgcattaattgtaacataaaccagaaaatagattttaaaaaaatcaccctaagctccaccctctaggtaactgctcttgtcattttggtataatttttcctgacaaatggatatatgtatactttaaaaaatagaattatccacacatattgcttaaatttttttttttttcacctaataaaataacctctgtgacttgttctatcagtttgggggccaaatatattgtcatccctcctggatcttttccattaattgctcagatacctgtttgtctttattagcagaacatcagatatcatcttcctgaggcttcctgcttctctttagcctcatgatttttctgcaaattctggggcctttctgtcccaagggatccgctctgcacatgccagccacggagaagtgttagtggccatcagcacggttgtttcagttcccaccacaaggtgtcactgttgagcatcagtctggcagagtcaggtggaggctcacagatgcccttgcttgattcaacctgctctattcaacaagcatttgttgaatattgttctaggcctggagaagtcttctaatctgagtggctatggggtgccagcagggctgagaaggcagcggtgaacaaaacagaacatacttgaaacaggtcatcggcccagtcctccatgcgtgcccttttgtattttttcttgctggcagatcctgattcaggtacagtcagcatcaaaagggaccatgcggccgggcacactggctcacgcctgtaatcccagcactttgggaggccaaggcaggaggatctcttgtgctcaggaattccagaccagcctgggcaacatggcgaaaccccgtctctacaaaaaatacaaaaaaatgtgccatgtgtggtggcacacgcctgtagtcccagctactcgggaggctgaggctggtggatcacttgagcccaggacattgattgaggctgcagtgagctatgatcacactgctgcactccagcctgggtgacagagcaagatcctgtctcaaaaataaaatggggggcagaccatgcactgggggctgtcttatgtgttgaaggatgtttggttagaagcatccttgacctctgcccatgagataccagtaacatcccccaactcaaagtcatgacacatggaaatatccccagatatttcaaaatgttcccagggaggcaaaatcactcctggctgacgagctgtaaaggtcatgttactctttacctctagcacaatggtgttgactcacccaacatgagtgtggctgacagggaggggcctctcagtcactcagtacatacaaaatctgctccaaaggtgactttctctctttacccacagtgagaagcagatggcagttttctctctttaaaaaaaaattgcaggctaggcatggtggctcacacctgtaatcccagcactttgggaggccaaggtgggagaattgcttgaacccaggagtttgagaccagcctgggcaacataaagagactctacctctaccaaaaaaagaaaattagctgggtgtggtggcatgcgcctgtagtcctagctacttgggaggctgaagtgggaggattgcttgagtcctggaggtcaagtctgcagcaagctgagatagtaccactgaactccagcctgggccacagagtgaggtcctgtcttaaaaaaaattgcaccaaattacagtgttgtcataaacatcttcctttgtcaataaatgcattcacttcttatttttaatacctgaatactaacaatttattcaaccaatctcctatttttggaaatatccatatttttcctatcataagcaacgctgctgtgaatacccctgagtgttatctttggggacccccgtggctatttctttacagtgaattcataggagaggggtcttgcagtggaacatttgcatattttggccggacgtggtggctcacacctataatcccagcactttaggaggccgaggccggtggatcacctgaggtcaggagtttgagaccagcctgaccaacatagtgaaaccccatctctactaaaaatacaaaaatttagctgggcttggtggcgcatgcctgtaatcccagctatttgggaggctgaggcaggagaatctcttgaacctgggaggtggaggttgcagtgagctgagattgtgccactgcactgcagcctgggtgacagcgagactccatttcaaaaacaaaaaacaacaacaaaaaacccatattttaaaaattatggtgaacattgtcatatatctttccagaaagtttgtaccaatttatgccggcacaatgcctgacagtgagcgtttgaggttaggtttttaattgcttttcagaattcatgttgtctcatccgggaggcactactgagtttggcagcatccttaaaagtagagtgagattccagtttccatgagagaggcatttatgtcagccttatgggaaagaatagttatttttttgtgacattctaggctgtgcgagaccatggggaagaatagtcatttttttgtgacattctaggctgtgcgagaccatgaaagttctggtgctccgatttttatttatttatttatttattttgagacagagtcttactcttgtcacccaggctggagtgcagtggtgcgacctcggctcattgtaacctccacctcctgggttcaaacagttctcctgccttagcctcccgagtaactgggactacaggtgcatgccaccacgcccagctagtttttttttttgtattttagtagagacgaggtttcaccgtgttgcccaggctggtcttgacctcctgagctcaggcaatccgcctgccttggcctcccagagtgctaggattacaagtgtgagccatcacacctggccctgtcctctgatctttttaaaaatttttttgatccagatggacagtacaatttatattgtgaccccccccacacacataggtacacatacatgcacacacacagctacacatacacatacacaattatagcatgtttcatgaaacaatactcctccttcttatgcatgatgaagatgttgtaaattcattcctgttctattctatatcatttagtagatgctagtaatagccactttcttttttttttttttaagatggagtctctctgtcgcccaggctgcagtgcagtggcatgatctcggctcactgcaaactccacttcctggattcaagtgattcccttgcctcagcctcctgagtagctgggacaacaggcatgcgccaccatgctgctctaatttttgtatttttagtagaggcggggtttccctatgttggctaggctggtctcaaactcctgacctcaggtgatccatccggctcgacctcccaaagtgctgggattacaggtatgagccaccgtgcctggcctgcctctattttttgttttttgagacagggtcttgctttgtcacccaggttggagtacagtggtgtgatgtgatcacagctcactgcagcctcgaccttctgggctcaagcaactgtcccacctcagcctccccagtagctgggactacaggtgcataccaccacacctgtctaattttcgtggagactaggtttcgccttgtcattgcccagtttggtctcgaaatcctgggttcaagcagtcctcctgcctcggcctcctaaagtgctgggatcacaggcatgtgtccccatgcttggtcaagcagcacttttcattacacacctcactatggtttgaacctacactgatcccctacctccacataggcctccctctggactcttcccaggctgctaagactcagtcttctatgtcctgcctcagatgccagccttagggccactgggaccttgaaagcaatgaccaagtgctccattttaacccattcctacagcacttagcactgaagtcagctcaactcagacttcttagtaaagaattgtgtacccagttctgatccttaacactgtacttcacgtatgctgttcctgcaggtgatggtgccacttaaaaacattttaatgcttacctgttttggggagcaatttgtttttaaatgaatgcctctcttttccactagactgtaagctgcaaaagggcagggatcatacttgtttctgctcactattcaattcccaggaagatcaatatctagcacatagtaatggttcaatacatgtgtattttttttttttttgagatggggtcttgctttgttgcccagcctggagtgtagtggcgcaatcttggctcactgcagcctctacctcctggggtcaagcgatccccccactcagcctcctgggtagctaggactacaggcgtgtgccaccatgcctggcaaacttttctgtattttttgtagagatagagttttgtcatgttgctccagctggtctcgaactcctgagctcaagcaatccttgaaaacttaccagtggcttaaagaacacagtcttcctcatggattggaaaacatcccagggtttggctcctacttgaagtcctaccattcacattttcccttcaagccctaaatatctgctaaattcatgaattacttagagttttctagatgaggcttggatttcacatcttggtactcacatccctctgcctagaattttctttccttttgtccttctggtgaatccctgctcttccccaggcccagtgcaaagcctggttctctatgaggcctttcctgggctctgcaaactgagctgacctcttgccttggctaccggaacagcagatacttcagtgaccaccaggtctacaccgctgagcccctccctacctctgaaaagctgtgtgatgtgcttgctattaatgtccaccagggggaaccagtgagccatcctcaaagtatccttcatgtttggaattcccttcttccctcaaaaataataattggttccttgaagcttctaaccatcttgggagttggatggctttcctttactctaaaaatgttatcccagactgaggaataaactagtatctttcccatcatactcttacttcttgagggtgatattgtattcatcttaatagccccagctcaacccagagctggtgtttcctacagtgatgaaatcaggtttttaaaattctggcccaaagtgagggctggatgcatgtttgttaaatgacagaagacaagttgtattgaggaactcatatggagaccaaggatatggcagcaaggctgctttgtgcttggccaagaatgtcatctctttctctctctctgtccctgtctgtctctgtctctgtgtctgtctgtctgtctctctctctttctttctcagaggatggaggtagctttattttagagatgttaatgctaatcttagttttctccttgggttttagggatatctttattttccagtgcccaaggagccccgaagataggaaatcttaactcatttttctcttctcatagcttgttagatcacccttagcctgaaaccaaagaatactcattcattcatttagcaagatcaaaggatcccagagccaggatagcttaacctttccttctcgtggcagctatgtcctgaaaccaaaaaaccattattcactcattcaacgaaattggttgcatggttattctatgccaggtgctcttctgatctctagaaatgcgtgctgaggtgtgtgtctccataaagtttactttctagtgtggggggctggggcacagacaatgaattattgtcttaatgatcacgtaccttatgcagtgtgtgagaataagtgctatggattaaagaagacgtgcagcaggctaagcggggttggtagtgccctctggaatggagggactggtcatcatattaaataaggtggctagggcagcctccgttctctttctcctttctccttcttagtcctcaatcatcttctaggagtatggaatctggagtccaacaaacttgggtttaagttctggctctgccacctattagctgtgtgattgtggatacgacatattatgattctgtgctttgtttcctaagcagcaggatggggatgatgatcatgtgggccacagtggttgctgggagcattacatgagatgatacaggcaaatcaccaccaccaccatcactattgttagcaccgtcatcaccatcatcaccatcatcaccatcaccaccactaccaccatcaccacccaccaccatcactgttgttaccaccatcaccacccaccaccatcaccgttgttaccaccatcaccacccaccaccatcattaccaccatcatcgccatcaccatcaccaggctcctccagcctttttcttcccccagctcacttttctccacttctcctcatcctcctctcttttttcctccaaggggcccttccaaggggcttcagcctttctaattaagcactctcattctttgtttcccttccctctgagccacggtctccctcagcactgctgtttcttttgagactactccccttctgtctggcttgattgttctccagaggtaacctaccattccctggccacaaaaatagaggcaaaacctcaaaccagttttctctgggcacagccctagttttcctctgtggttactacagagctgaggtcctagggtgaaactgatttggctgcaggaagagcacgttctcaccatttgtctccacctcccactccattccaaaactgggaacttcagcgtctgaggacagcagggtcccttcctagaccttcctgtcctgggccacagctgtcttatcagaagagagcctggcggagatgtggcccagctatcagagtgctgttgctgtggccttcttcctcttctctgctgttctttttctctctctcctcttctttttggcattttgatggttttcagcctcataatttgtggtcatctgtatctttcctttcccaaggaaaaacctctggtcaagataatagaagatctgtgttgtggatattgttttccttttttaaaacgaatatgcttatgtaaggataatgggagatactgctttccttcctcctccccttccttcttttctacccttccctccttttccccctcccacgtgtgtttatcaagcactttctctgcatctggcacacacagtgttgggttccagggctcagggactttctcaggacttcaggattgaactgagacctgaagaggaggggaagtcttaatgactgggagtgatgggaacactcagaagtgccttgggacgggagggaggggagcatcccaggcacagagagaacagtatgggtgcccagtggggatgctggggagagtggtgggagctggagccagacaggtgggcagggccagcccccacggtgggccatggcaaggagcttacactgcagagtaagcagggtaggctgaacagaaggtgtctggatctcttttccggtttttaaataacactctggctgcagagtcgatgggtggcttagagcaggtgacagatgctgggaatccttcgggggctcagggagccacggaggggagagagtggaggccagggtgctgcagacaggcaggtgcccttgcacccctgcaacctcctgggagcttgcctgcctgggccctcctctggcttcttctcttgagtatcaagggggagaactggcagtcaggagaaaaacaggatgcagagtggcccccgaaataggacagcctcagatgccctctggcttcttcccagtttgggctttgaatgaagccccccagaatgccgcctgccaccgtacggtcttcctttgactggaacaaagactaagagtgggtcttgattgccctattgttctacttgcttctaacttgggaaaggctgggctggcagaggaagagctgctcctcccggagcccacagggtctcgtatgttctggtgttgacactgatgtctttcctttcccctgtaacttctccagccctcctgttctgtaggcactcaggaatcccttacatgtagatagcatcaaattaggactctcgcttacgagtggcagaaacctgatgcgaacgcgcttaggcgcaaatggctccattcattcattctgtaaacacggttggaactccccctgtgtcagttgccaggaggggttggggataacagtggtggggaaggctggctggctgtgggttctcatcagtctgtgtcccagacctgcactgttcagtacagcggtcaccagactcgtgtgaccaggtaaacttatattcattaaataaaagttaaaattcccttcttcgttctcaggagccatgtttcaagttgttcatcgccacaggtggctagcagctgccctattgcaatagcacagttctagaacatccccatcatcacagaatattctagtggacagtgctgctctagaatatgttggaagaaacaatgaataagaaaaatatcaagttgggcgcagtggtttatgcctgtgatcctagcactttgtggggcttgaggcaggaggatcgcttgagtccaggagtccaagaccagcctgggcaacatagcaagaccccatctgtacaaaaaaatagacaaaaaatccatctaactgggtgtggtggcacacacctatagtcccagctacttgaggggttgaggcaggaggattgcctgagcctgggaggtcaaggctgccgtgagccaagatcatgccactgcactccagcctgggcgacagagtgagattctgtctcaaaaaaaaaaaaaaaaaaatcaaatggtaataggttttatgcaagaattaaaactgaagtgaaacaatggtggctttgtggctggctttgatgggctgatcagagcaggtcagtcagggttcagccagaggagtagaaccaataagatatattaagagatttattgcaaggaattggcctatgcaatggtgggggctggctgggaaggtctgaaatctgtagggcaggctgttaggaagggcaggctgtttgttaggaagggcaggctgttaggaagggcaggctggtggaatttctttttctttggagagatctcagttctgggtgggtgcggtggttcacgcctgtaatcctagcactctgagaggccaaggagggtggattgctcaagtgcaggagttcgagaccagcctgggcaacacagcaaaaccccatctctactgaaaaaaaaaaataaatacaaaaaattagctaggtgtggtgtgtgcctgtaatcccagctactgaggaggctgaggtgggagaatcacctgagcctgggaggtcaaggctgtagtgagccgagattgcactgctggactttggcctgagtgatagagcgagaccctgtctcaggaaaaaaaaaaaaagaaagaaaaagagtctcagttccgcttttaaggcatttcaatttcaatgggttgaatcagctcacccggattatagaggagagtttttacttagagtcacctgattatagactttaatcacagcaacagaaaaccttcacctgatgcctaaattgttgtttgattgaataactggggtctatcgcttaaccaagttcacactgaaactgacagcgagcctctctggggagatgacatttaagctgagacttgaatgacaagaaagcatcagacaggagaagatctgggggaagagcattctgagagcaaacaggtctcaaatgcatgtctcagaagcacttttaagaagcagaaggcaggcttacatggccagtggttgtggggacccatggctgcgtgggtctgtgtctcagacctgcacttcaaaacctagtggctcaacacaactgccttgttatctctcattgttatcgagcaaaaggggctcgctgtctgatgcactagaagccaatactatgacgccggttttttgtttttgagttggagtctcgctctgtcgcccaggctggagtgcagtggtgctatcttggctcactgcacgctccgcctcccgggttcatgccattctcctgcctcagcctcccaagtagctgggactacaggcacccgccaccacgcctggctaattttttctatttttagtagagacggggtttcaccgtgttcaccaggatggtctcgatctcctgacctcgtgatccacctgcctcggcctcccaaagtgctgggattacaggcgtgagccactgtgcctggccaggtttttgagaaaagaaaagcttcttattgaaagttgactcccaaggacacaggagtcaagctcaaatctgccactctgggctggcttcaaggcagtatttttattaggaaaggcttagggggtagatactgggattagcaggtggttggtggagggaaaggggaagtctggaaagtccttgggtgtgtgtacttatttctttatgttacttcataggttgcatatgcaaatttgggagaagttagtatgaaatatgtggtggaaatttgggctgtgatgtcagcaaacttgtgcacaatctccagttggtcatcctggttccaattaattttagcccactgccaactttttaaaaaacttgtgagttaaaaaaaaaaaatagaagaggagggaatttcagcatctcagcaagttgtttttttttcttatctgttatcctgcaaactcagtaatttctgtcattggtttcattaactctttagggtatagtttcatcatcataattccctgggctcagggattggctgggctcagctgggtggttcttctgttccgtgtgttgttggctggagctgcagtcatctggggcttgactgggctggaacatccaagatggtgcatgctcatggatggcagttggcactagttgttgagtgggtgttcagttggggattatctgcttaggtgcccacatgttgccttttatgtgacatgagcttctcacaacacacatcccaaggaggaggaaatggaggctgctagttctggaacagtatcccttctgctagtgatgatctcagtgatgggtcaatcagggaagccaaattactgtgagtataatggaaaaaatggaatttattagatgttagacttatacgaccgtaggaagagctggggaggtacaagctcaaaaaaaaaaaaaaaaaaagggaagcttaagattcagagaaaggtcttgaacctaccctgacataggtaaggcagcctgcggtttcagggacatctggcagccaatacgtccagctgttggaagggaccatgaagacaggcttggatagatgcccagggaaagttgttggccctttgtggctattgcctttgtgagtttgtcatgaagcatctggtggtgaacttaaggtcggctgttggtcattgagggactactgtcaggaagaagagttggctgtgaggtagggaagatggaggataaacaggaccagcaccccagcctctgttccccattgccttcaacccatgttactcttcagggcatgatggctccttctcttttgccacccaagccttgtacaacttcacttttggccagctctaatctggaaccacacagagaaggggattctggaaacatgggtgccatggaagcatgggtgccagtgtaactgagttgtcagtgggctaatccatgactgggagaggaggcagaagataggagatgaggtcagagacatggtcggggctcagttcctgaggccccttgtagccattgctggcagcttcttagtagaatgggaaaccactggaggggattaaagaagggaagggacttgttggatttcacttaactcgttctaggctaaactaaatccatcagtcaatttcccttcctctctccctccttcatccctcggtgttccctttctgtctaactaccttgctttcctcatctgtaaaatggggatgctagttgtatcatcctcatggagttgttgcaaggaaagaaatgaagtcatataaacactgtgttcgtataaacacttgtctggcaaatttggcactgaatatgtactggactgtgattatttttattgtttttaaagtcagcttccctccctccttcctcctccctccttcccaagctgaatctgaaccaaggaagtcttcctacagagccactgactggtccccactaaggcaggggtggagggaggggcaggatgttttcctctccagcctttgtcttgcagcagaacccctgtcgagcaacctggtccaaggcttcatccacctgtcctgtccccctgcagcccactttctctttcttgcaggccacccctgccccctctgtcttgcccacctgctgcttcatgtggccagcatctggcttttgtggaacccccccaatgagaacaaagagaacccgactctctggctgtcatctctgatcagcgctgtagtcactttctctttttattcctggcatccacgaggtgctgggcagaagaattgggtgcagaattgacattgaacttgtgcttggcagggcctgaactctttgaggtttgtgggttccatgaaactacatgaactgagtcagctccaaacagactattacatcttagaatgagacccccagtcctgtccctgggctcccgatctggtccctatctgctgatgttttcactggctcattgcacccagctaccctctcttcttcacaacgcctgccccagggcctttgcacagcccttctttctgcctggaataccctgcctcaatcttcctctggctgattccttgtcattttggactcagcccaactgccagcttctcagagtcccacttccatcctggccactctctatcctatcatagtctctagcatatctaaaatgattttgtttattttcatacccctttccacaagaacagtggtgctcaaaacctcaacatgtatcagaatcccccagagggttccacccccagagttcctgcttcagccagtccggggcagtgcccagaaatctgcattaacaagttcccaggcgacgctggtgctgctggtttggggaacacgctttgagaacccctgtgttggaattctccctgcatctggctcagagttggaatgcaagaagtagtcacggagtgactgagtgaatgctagtggttgatgataacagcagcgacaaatattgattgagttcttactgggccaagtcacgcagcacctgctcatttaattcttcaacaacctcatgaggtccgtaggattattattcctattttctggtaagaaaactgaggctcagaaaggtagagcccttgcctgggaggggggtggtggtcacacagcaactaagtgtcagaggcggggtttgaactcatttctgtctgactcctgttaagcggaggcttcccacataaaaaagtggtgggaatgaatggctttctccttaactctgagtggtccctgtgtttccatttgctcagcttgagggagcaaccctttggggcttttgtagcagcttacactggaactgagataaaaagaaattatttaaaggctgcatgtaaatatcaaataatactgcacatttgcagagcaccttcagttttaggaagcacctgcatgcaggtgatcttgttttagcctcgcaaccatatgagtggtgggcagattaggctgcacgcccagtttcacagatgggaacattcccagcagatttgactctccatcagtatctctgtccttcccagccacggtcctgagggaggatgggaggcttctgtgggcgcatgattatgtttgaaacttgcagggaacatgcagggggaaggcagaaagggcaaggaggatgaaaatatttgttattatttggagcaaaattattcttgccttcctttaaaatatgctgaggggagatggctccagttcattatagtcatgattttcactcaggtggctttttgctttctctaattatttccctgattaccaacttatacactcgtgtgagaagtacccaagctattgtttgggagagaaaaagaaagcaccgcattgaccataatttgcatccacattggtatgttacttagcaattttttttttttttttgagacagaatcactctgtcgccccggctagattgcagcggcttaatctcggctcactgcaacctctgcctcccaggttcaagcaattctcctgcctcagcctcccaagtagctgggattacaggcacccaccactatgcccagctaattttttgtatttttagtagagacggggtttcaccatgttggccaggttggtctcaaactcctgacctcgtgattcgcccacctcggcctcccagagtgttgggattataggcgtaagccaccatgcctggcttagtattttttaaacagctgcatggggacaggcgtggtggcttacgcctgtaatcccagcactttgggatgccgaggcagatggatcactggaggtcaggattttgagtccaacctggccaaaatggtgaaaccctgtctccactaaaaatataaaatttggctgggcatggtggtgcatgccaatagtcccagttacttgagaggctgaggcaggataattgtttgaacccaggaggtggaggctgcagtaagctgagatcatgccactgcactccagcctgggcaacagagcaagattccatctcaataaataaataaataggccaggtgtggtgactcacacctgtaatcccagcactttgggaggccaaggtgggtggatcacctggggtcaggagttcaagaacagcctggccaacatggtgaaaccccatctctactaaaaatacaaaaattagccaggcgttgtggtgcacgcctatagttccagctactcagagcgtcgaggcaggagaatggcttgaaccctggaggcggacgctgcagacagccaagattgcgcattgcactctggcctgggtgacagagggagactccatctcaaaaaaaaaaaataaaataaaataaagtaaaataaaataaaatgggaaaaaagtctggaaggaaatccacttggatatttagcatagctgttctttggttaagggtgatgattttctttcttttgcccttctgcattttctgtctttctgggcaacaaataagtagttgtgtaacttaaatgagaaagtttgaaggaaaagaatcctcctcgaaccctgtttgcttactttcatctgtactgtgatactttcttctctgctgctgatgcctggtggggcaggatgctctgacctcccaggtttcaatggttttctcactgattcaccgtccctttgcatctgttcaaaaggaaaaactttctgggctgcatctttctaaagtaaaccttcccatggcttaggcaactcctgaccactgcggggaggatttccttgattgcacctgtgtcgatcttcggccatagtcattgggcagttatcttgtagttgctttgatatctaaatctcccatattagactggaaattcctagatagcaagagccatcttttaataaacaaaataataacgataaaatattaaaaacatactgagtgtcaggcggtgttctgagctgattttgagggttatttcacttaatcgtcagatatccccatgagacagggacttttgtattccccagttttcagataagagaatgaaggcacagaggggtgaaccatggtacccaaccaaggtcacatggccagtaaattgcggggtaccagcacttgagctcgggctgattccagaccgtacactctaaacgcagcactttgttcatttcctacaaactacttagcatggttgcaaaagtatcattgaatgaattaacgaacaaatgaactgtcataatctaatcacagaaattatgtccttggaggggaaggttgaagcctttataatttgccctaggggagagaagtgaagccaaagcactttctgtctgtgtatcaggaatgagatcgtgtgggagggatagtgatcagataatgagagattttctctctaaaacaggggttgaccaagtatagcccacgggccaaagtcagccctccacctgcttttgtaaataaagttttattggaacactgccatacctatttgtttccactttgtctatggctgttttcacgctgcaacatcagaattgtgtagtgtgacagagaccgtatggcccacaaaacctgaaatatttactgtcaagctttttagagaaaatgtttgctaaccctttttgtaaaagaccaagctagaaatagtgagtgtcaattaaaacaaatacatacatgtctaagtcaggggagattttggtctgatgtaaagaagaacttccttttggaggagggcaataaatacatgaagaggctggggaggcattgactgtggagaactctgtagtgggggtgaatgaatatttgcacaagtggtacaacatttatagggggctgtaattgatcaagaacttcctatagtaagtgctcaggggaaggcaggaaggaggcacacgcccagagagggtgagatgcctagggtcacacagctagtacctggtagagcttgtgctcaaacccacatcagtttcacccaaaactttcattatacatggtcctgactgggcatggtggctcacacctgtaatcccagcactttgggaggctgaggtgggcagatcacaaggtcaggagttcgagaccagtctggctaacacagtgaaaccccatctctactaaaaatacaaaaaattagctgggtgtggtggtgtgcgcctgtaatcccagctacttgggaggctgaggcaggagaattgcgtgaatctgggaggcagaggttacagtgagctgagattgtgccattgcactccagcccgggtgacagtgcgagactccgtctcaaaaacccaacccaaaacgttatgcatggtccattgtgctgacttttggggtctgttcggcatcagactgagttctttggggagtggggaccacatctcgttgtctttggagtgctgtacacagatgctgtctggatagtactctctgaaggtcactcctatataggagtctgtggctttctttgggtgagtgtgaccaccatcccgatgggattcagaaatgtggggttgccctacactccgaatttcccccactgacttcactcttcaaacaggaaaccttaaatggtcctcctttccccacacagagaacctgttgctttgagttgggagggtgggagacggtacttccctacccccaacatcagccctgtccttgggaacagagctcagtttagcttcatcatctgatcattttctttctttagcgcctttgtttctttccttctctatctggtactttgtggaggagaaatgaggcagaccagctttgtaaccggataccaggatgctctcagtggctggggctgacagatttttcaagctccacttgtaaagaccttgtgccatcatgatcacgtagggtggaggaactgagcgtcagggctgcattgttgctttcaatcctaggctccttgcttgaaaaagttaggggcacgtagctgcttggccgtagacactgggatgccttttcctcccagtgttttcttggacaccatacgaccagggccacctcttgatggcgcagtgtcatgtttggccaccaggaggcgctgcccgataagcttcctttagcggagacgtcaaaattgtcttgaaatcggtgcacaagatgcatagtaatgtagaaactggcaggaacctcggtctgatcatctcaacttttaagtaaggaaaaactgagtctgagagaggaggagggcttgacccagctacagcagggactaatgctggcttaattctgtttcacagaccgagctttctcggcaggcaggctggaagccaggggagaccctgggtttctttcccggctggcccctagtgaacggcagaggcatctatcagagcagcctactccgacggggccttgctgccactcaccttccttccgcattcatgtcatgatgctcttgcgttggtctccctgccacactgcaagaccaattaagaggagaaaatgaactgtaaagaaggaacattgaaatgcagcctccaaataataactagtggagatgcaaagggagctccgaagcgacagaaaaaactctaggcagtggcttcattcccttgggagacatctggaaagagcttggggcccggcctggggcacccccagctgcatgggagccctcccgagaggctgtctaaagaatggctacgatgagaagtggctggacttgcttcagttgaaatcagtgttctggtgcttgccacattccctgcagtggggtgcactgataaaaaagacacgggccacagttggcaaggggccgggcctcccggctgcgtcattcagctgccctggttggtttgtggcacagtcaggaaggcatatgagtcctgagcctgggatgtgagtcctgcctgggccacgggtccagcctcttccctatcggaacctctgtctttgaaacaggcatcgtgatagcgagtcttttagtgttgtgatgtttaagggaggtgatgtgtgcttttgcctctgtctgggacaacctctccatctgagcgggactttgctgtgctccttttggctggggtgaattgggaatcatacaacccaaagagaatggtgaagtgaaaggtttctctccatttcctaataagtacggtgttggcattgcctgttctgcctccagtatctttctggaaggtagattccacaggaactgaatggtctcggggccccagagctgttgaagtccactccatgatgggtaccgacagttgagggtgttgcctgtgacttccatcaggccctaaacttgacgatgctactgccctgtggatggaagacagtgttctgaccccttttagtactttggagcagaaaaaagttagcacccaatcgcaatcttttttaacatatttgggaggttgggaaaagtttcccaatagtcttttatggaaatatttttactccccaagagtgggcaagtttctagactaaagggattttctgtagggggttgtcagtttacggagggtacttcctaactgcagactgtctggaggctgtagggtaggcggccttgcttaacaacagtgctcatcgttaatcctctctgatgtcagtcattacatctcaggtcccaagtaggaggttttcttggtggtctccaattacagcacaaaaagggctagcccctagggtttctcaaccttggcactgttgacatttggggctggaaaattgtggtggggactgtcccatgccttggaagatgtttaacagcatccctggcctctacccactggatgccagtagcatccaaccccctagcccctggtagtgaccatcaaaaatgcctacagacactgtcaaatgtcccctgcggcaaaatcactctgggctgagagccactggcttgactgatcctaagcgctccaggaacatagccgctttggttctaaggaggaggataatgattatgacgacactgacgacaacttctgtattctgaggccagatgaaagccaggagcttttgtgaacactgaggttctgtaaagcacagaaaaccataattgagttggggtttggcttatcatgcccagagcatggttttcccaggggtctttagtccaattaacaggaaccagatgaaagcgaggaaccgtgatataccaccctccctccaactcgccatgcacacacatacatgcaccatctctccctgtctccccagggaccttgttaaaacttccatcagttttgcagataaacagctcctgatcacccatgaaagggggcaacagcagacggagctcagggctggaggcaggatgcttcggttctggctctgcccctgacttctctggttatgggagcctgggtcagccacatggcctcactgagcctggtgtcttggtctgccaaatgcctgaggacaggatggatggcccataagcccctttttccctggactctgtgtctcgggttcgattttcatgcccagccagtgagctgccagcagtaactgcatccctgccctcgaagacggctctctggtttacccgcacagcttctaactgttgttactattactgcattgatccctatatccactcagtgacaccttttttggattctttgaacataaaaaaattaattcccacctttgcatttgtttcttctgcctgcaatactgtttctgtgagccagctccttttcattatttgggtctcagctcaaatgctgtaggaagtactcagtgcatggtattagtgtgattatcatatattactattagtatgattctcattgctcttctcaggctggggaagcacaggggctgggaagcccagaggaggagcctcaccgcagcccgagcaaggtcaggggaagttttctaggagaataaacccctccattgagttcaaaggctatgtttgggcttctcctgttgcctcctgggttgattattttattttattgcctatcaaatgccaaatctccaatctactcaggacagtttcttttttcattcaaatcaccatagctcaaaaaaaatccctaccccgccccccacccccagtatctttttggaccattttgtgatgtcaaagctgcctgcaaactttcagtattgaagtcagtaacatacggtgccctggaaaaggtgtacttgttttgtttggattttggaaagaaggacagagttgtactcaactacatccactttcctttgatctttgtaccaatgaccagagggtggaagcagaatttacctgaaactccttttaacttcggatcatggtctttattcagccgagtccttcggattcttgggtgatgccagttctgttttttttttttattttttttgagacagggtctcactctcttgcccaggcttgagtgcagtagcctgatcttggctcactgcaacctttgcctgccaggctcaagccgtcctcctccctcagcccccagagtagttggaactataggggtatgccaccatacctggctaatttttttaatgaaaattttttttttttgtacagacagggtttcaccatgttgcccaggctggtattgaactcctgggctcaagcgatccgcctgcctcggcctcccaaagtgccccgccaggtgttgccggttctaagacaagatactgtgattttttgggaaatcacggtaggggaattatgacatcaaggtgggttcaaaataggttgagatgaaagagcttgtagatttcttcatgaaggaaggacttagtgtccggtggtcttttctgaatattcatgatgccactgaatgtggaaaaagaggatttaaaatgcacccctggccaggcacaatggctcatacttgtaatcccagtgacttgggaggcttgcttgagtgacaggaagattgcttgaggctgaagttcaagactagcctgggcaacatagcaagaccacttctctacaaagaataaaaaaatcagctgggcttggtcgtgtgtgcctgtagtcccagctattcaggaggccaaggctggaggatctcttgagcctaggtgtttgaggctgcagtgagctatgatcatgccactgcactcctgcctgggtggcggagcaggaccctgtctctaagaaaactccaacccccacccccaaatgcactcctgtcccaagggtttctgcacagatatttaacattcctctactatgtataaggcattggtccacgtttacagtgtgctagacacatcatgtgtgaggaatttccatggatgacttcctttgatttttattacaactttctaagctatgagttgtcccgtcccttgtaaaaagggaggggatagaattcagagaggtgcctgggcctagcaaaggccgcacagcttgggtaagtcacaaagccagcattgtgctcagaacttagggtgaaaccaccactacataccgccccaccttcccgcctccaccaccccccgccccacgaaggctctgaaagagcaaaaggaaggcagggtatttgttgggagcccacgtgctgtgcagaagccacttggccagggtcatgccactggtctctcctgggtctgtctgaaagcccgtggacttcaagagttcagactgattttcaagggacgtaaacccatcacctgcagtgacctgttgtcccaggcagcagtgcattggcctgtgcctaggtaaggctggtggatggcttcatagcctaggagtaggttggacccaaggcagaaggtgagaagtagggagaagtgagatgacttaggaagggctagagacaaggcctggggtctgaaggagcaccctgctctctagggctctggaaagggcagattggaatgctgatgccatcctgcctccagcttgctctgtgacatcaggcagctactggcctgacctccgtggctctctgtaacaggaacactgcaacaatacctgcatcttccttagatggtggcattgaggacgcagtgaggtgatgcagataaaagcttgcagctcagccctgctgcattctctgtgctcaacaaatgtcaattgctacttttgttgatgacgctgggtctgtagctttatctgtagccattagcaaagaagaggggggaatttctctgttgaaataaattgccttgtagctctggtttcctcccctaaaacatgtggatgcggacacggtacaagatttgttttgttttgttttgtttttgagatggagttttgctcttgtctcccaggctggagtgcaatggcatgatcttggctcactgcaaactccgcctcctggattcaagtgattctcctgcctcaccctccccagtagctaggattacagtgcacgtcaccacacccagctaatttttgtatttttagtagagacggggtttcaccatgttggccaggatagtctcaaactcctgacctcaggtaatctgcccgcctcggcctcccaaaatgctgggattacaggcatgagccactgcacccggccacagtacaagttttataggaggtgaaaaaaccaccctcaagtatcttaaatggtgctcccttgaaaatagaaccaagttagctgttcctaaaggttatggcagtcaagggatgatgacatcttagtgggcaattgacctatgcattcagctttaaccagcatttattaagtacctcctgtgttcttggattgtgtggggtacttggctgtgtggcctttggcaagtgaattcacctgagccatcacttccatgtgtggaaattcagataataactgtccctacctcttgggttgttttgaggattaagtgaaatcaaatatacaaagtccaatgtcttgcatggagttgctgtgggtgcctgataaccaataccttgctgttattattattgggtaataactattgttactagtaggtgtcttcgctatatgatttcatttaatccttccagcagtcttgcaaggatttttctcccccttgctttcaacttgacttcattttcccaagctgtctcctgtgtgaattaagtgcctggcgttcctgcccccaatttatagaagaagaaagaagggcagctgccaagcaacgtggttcaggtctcaaagaggcaaagaagaggtgccctgggctgtcctgcccctgcttcttgcaaggtgggccaggttggagatttctgcccacatggaacaagcgggaaacttctcctcgagggaaagaaattgctcaaagctgttggagagatagcatcagttaagaaccaggatggaaaaagaaagagctaaaaaataatccaaacttcctttccaagtggatttattgggaaagagaaagaaagagtgaaatgaagcaagttctgcccgaacagacatgatttaaagcggcaagggcatattgataataatatcagcgtttcttgctctgggggaggtatttggatttttcatgctctgccggttccccaggagacaggaacatggaggaagttggatctggggacatgtcacatctcttttctctcacagccaagaaatctatttatttaattaaatttccttggagtttggtttttcctttgagctaattttctcatctgttttccttctttctcaaggaaaatgaggcagaattttatcagtaggcagactttatcaatagaaatgacagtattagtaagaataatagtaaaaatcatcataaaacccaaacagtatcatgtcttctctgatctccggtttgtggtcaaagttgcagctgtctttttagaggaatcggttgctaactcatagcttaaatttgtttctccccacgtctgcctcaagggcttgaggcttgaggtctgatagaattctgagaaaatctttttaatcatctggaaatgacgcaggctttcttaggagatggtatattctttctctctctccttttcagtgttccttttctattctagcctggctggctattcttttaatttaatttaatttttaataatttcaacttttattttttgattcgagggtacatgtgcaggtttgttacattggtatattgtatgacactgaggtttgggatatggataatcccatcacccaggtagtgagcgtagcgcttaatagtttgtttttcagagcttgtccccttccctcccccttctaggagtcccctgtgccttttgttcccatctttatgaccatgtatacccaatgtttagttcctacttttttttttttatttttgagatggaatctcactctgtttcccgggctggagtagcaatggcttgatcttcgctcactgcaacctctgcctcctaggtgcaagctcttctcctgccccagcctcccgagtagctgggattacaggcatgcaccaccatgcctggctaatttttgtatttttagtagaggcggggtttcaccacgttggccaagctggtctcgaactcctgacctcaaatgatccacccatcttggcctcccagagtgctgggattacagacgtgagccactgcactctacttataagtgagaacatgcaatatttgattttctgttgctgtgttagttcacttaggataatgctggccagctatctttagaggaaaatagaggaagacttgctaagcatgagcctgtctgctttatgccactttgaaatgtgttgaatagtctaatccaggagccagtgaactagagtgggctgcctagttaaagttttactggtacacagtcacatctaatcatgtatgcattgtctgtagctgcctttgtaccacaatggttgaattgattagttgcaacagagaccgtgtggtccatgaagtcaacatctttactgtccagtcctttatagaaaatgtttgtagacctctgtcctaggccttgactgtagccctctgttgtttttcatcagtttctgatgtgagtgcttgtaaacaagtaggcccatgtacttattcattcatcaagtgttttgggaaccctttctttgtgccaagccccatgttaggtacaagagatttagagatgagcacatgtacttcttgtctttaaggtattgtcatgatgcaataagatacagagaactctgtcagctgcagtggtggcacagagggtaaaacaagcagtgttttggaggctgagcataggagaaggttagggaagcctttagagtgaaggagatatttgagttgggtataaaaccagaaagttaccaattggttgggggaacatgtctgctcaggcatacggaaaagcctgtagtgaggcacatagttgtgataaagcgtgagttggaagtcagcctggaagaggattagggagatgaaaagaggagatgagactggggagggaggtgagaggttatatgggaaggattctaaggacaggaatggtgactcttatgtcttcatcttccatggtgattagcttcaaggagcaacttaaggggtggtgtgtggttgactgagttcatcatactggagttaccccaaggtcaccccatccacaggtagctttgaagctggccgacctggacccagttggctgtcccagactcttcagaaccatgtcatccttttggaattgactccccaccttctgaggccaatgggaatgtgagcactagacttctccaaggcatggttcttgttttcacagtgggacacagatggcagttgggaggctagctaagggacaaggacctagagtctggtgcatcccacagagggtctcggaaagtttcagagggacatccaggtggtatggatactggatgccttctggaagcctagggccagggctgaggggcccccgaattaacaagatacagaccagtcggccttgggtgctgtccacccttgtaactcaggacagcctggccgcaagggcaggtccggggtttgtacatttgctttcataaaagggcttagtgatctgtgcttccttatctgggaatggggatcattataacacacacttcttaggattatgttaagtatgtaatgagttataatacataaagcaaatacttgatatacagtaagcactcaataaaaatggtttggtagccatttgtatggctactaatggtttactattcaggatagcacgttgcaaaggatgttgagggcttttacgtgctgccgtgttctggatattacataacaccaggattctacctgaacttgactgtggctttctgtttttgctaatcataggttgagacaagtgattatgaagcaggctgtgggatgtatcgtttcagggaagagttggtattgaggtgacacttcccaagtgttactgcataccggacactgggtaggccctggggacgcagcggtgaacaagtagcacattgtcccatcctcatggagtttggtgatggccctggaatcaatacaagaagtagccagagccctgggctgctctgctccttggtgttcgagtctgtgaaatagaaatgatgtgagtccctgctacattttttctccccaggagatagggaagataatatgagataatggtttgggtggggatttgaaaagctgaattgtggaagggtcatacataagaataatgccagagtgatgagcgcagactctggaattagttggctgaggattgagaaccagctttgctgcctactagctgtgtgaccttgtgcaagttacttaacctctctgtgctttcatcaccttctatgacatgaggatactactactacctcatagggtttaatgagtctaaacctcatagaatttaataagttataggacactgacctatcaaagtgcccaatatttaacacttacctattgtgttatacattgtaagtgctaaataaattatccacaatatcaatagcagcagccaacatcattgatcaactatttgaaaccaagttgacattgatcaattatttgatctgtgccagatactttgcatgggttgtctaatttattcctcacaatgactttatatggtaattattattatcctgattgaatggataagaaaactgaagcttagagttaagtcacagccaagagcacacagtgagtaagtcttggagccaggttgtttgacgccagtgcctgagatcttaacttccatcccagccctgtgtagataagtgattttagaggcaggacatgtttaccaggtggaggctcagcttatagatgggaagggagaggaaagccctgcagctgcaaaggggatctggctgcatttggtttaatgtctcagaagatcacccaagtccagtctttcttcctcagacttccaggagcaggtacaccttcttttttcctttcaaaaaggcagacttcattctctttttcctcctcctcttcagtttttaccatggctttttgaagtcaggagcagagctcagaaatcccaagaacacatctataaaagagagctactgcccacgatgattatgccttttttttttttttttttgagacagggtctcactgtgtcggccaggctggagtgtggtggtgtgatctcagctcactagctgagactacaggcacgtgcctctatgcccggctaatttttttgtattttttgtagagatggggttcaccatgttacccaggctggtcttgaactcctgagctcaaagcgatctgcccaccttggcctcccaaattgctgggattacaggcatgagccactgcgcccagctgtccatgatgttgaaacaaaaagtgcaggaaaaccggagccctcatccttgaatcagttctgtctctctcggcgtgtgtgtgtgtgtgtgtgtgcatgtgtgtatatttttaaaaagatcttgctaaatgctaatacctgcatctgctaatgtcaggcagtgcttcacagaggtcacccttcacacttcatgtgtctcttgcttgtcattctctgaatattttgagagtggaagcttgaccctctctctaagaagcagtgtattttaaatggtttttttttgtttgttctcctattagtgtgttttttccccttagtcttcaaaaagatctttttttcctccttcccagtgcccagtagcctgaccctgccttgcttatcaaagacagtataacaggaacagctaacgtcaacccccaggaacaggacgttgccacagctctggctgaggctgcacagcaggactgctgtgggctttgcaaagagagaatttaagtcctttagcacctgggagggtgtacatcttctttgcaagcctttgtaggctttgacagatggtggctgagcagaggtggatccagagaggtcaaggtggtaattttcctgaacatggatcagaaggaagtggggtgaattcattcattcattcattcattcttcctccatctcattctcttctgtttctatccatctcccctttgctctttccttccttccatccatacacccacccattcatgcatttatccatccattcatccatccatccatccatccctccatgcatccatccatccacccacccatccacccacctgttcacccacctacccacccacccatccacccacctgttcacccgtctacccacccacccatccacccatccacccatccacgcatctatgcatgcatgcatgcatctgtccgtccatcaacccacccacccatttatccacctacccatccatccatctatccattcttccatctgtccattcctccatctaatatatagacactgagccccttctatatcccaggcactctgctgagtgctagagatttagaaatgatgagcaaagctcctgcctttgtggactgaaccatctaacaagggagacagacaataaaccattcagcgaaacaatgagatgatttgagaatctgacaaatactgtgaagaaaatagtgagggagccatgttagctagctagggtagttagggaaggtctttctgacaaagtaatattgaactgagatctgaagactgcaaaggagagaagggatggcagaaagagtgctcaagacagagggaatggttacatgaagaaggaaagtattttttgcttggaaaactaaccagagttctccatggctggaaccactacatttatgccccgacccatgcacctatccatccctgcacacatttacccagccatgcccccaaccatgcatccctccatccatccatccgcgtacctaccaatcttccatgcacacacccatccacggacccacacatatgatccatgcacccatcttatgtccatctgtgtacccatcaatcatccattgacaacctaatatgtgtcaggcactttgttttgtttcgttttgagatggagtcttgctgtcacccaggctggagtgcagtggcgcaatgttggctcactacagcctccacctcctggggtttaagcggttctcctgtccagtctcctgagtagctgggactacaggtgtgtgccactatgcctggctaatttttttgtatttttactagagacagggtttcgctatgttggccaggctggtctcagactcctgacctcaagtgatccacccacctcagcctcccaaagtgctaggattacagccatgagccactgctcccagctttgtcaggtactttgtttaatttttttttttttttttttttgagatagagtctcgctctgtcgcccaggctgaagtgcagtggcgtgatcttggctcactgcaagcgccgcctcccgggttcatgccattctcctgcctcagcctcccgagtagctgggactacaggcgcctgccaccacacccagctaatgtttttgtatttttagtggagacagggtttcactgtgttagccaggatggtctcgatctcctgacctcgtgatccgcccgcctcggcctcccaaagtgctgggattacaggtatgagccaccgcgcccggcctaaaatttttttaaaataattttttattaatgcataataagtgtacataatttcagggtacatgtgacaatttaatacattcatataatttgtaaagatcaaaaagtgtaggaatatccatcaccttaaatatttgtcttttctttatgctagaaacatttgaattattctcttgttgctattttgaaatgtatgatagattcttgtaacctatagtcacactactgatctgttgaatactaggtcttatttttttctatcaaatcgaatatttgtacccattaatccaacttgtcgtcataccccctccccctccccctgccccttcctagcctctggcaaccaccagtctactctctatcttcatgagacccacttttttagctgtttcataggagtaagaatatgtgatgtttgtctttctgtgcttggcctatttcactgaacaaaatgacctccagttccatccgtgttgctgcagatgacaggatttcattcctttttatggctgaataatattccattgtgtatatataccacattttctttacctattcatccattgatgggtacttaggttgtgtccatattttggctactgtgaatcatgttgcaataaacctggggttgcaggcagccctttgatatactgacttcctttcttttgggtgtatacccagcagtggaattgctagatcagatggtgattttatttttagtttcttggggaaactccatactcttctccagagtggctgtcctaattatatgtcaggcacttttggatatcaaggtgaatcagagagacatctctcttctcttacttgatctcctatcagtatgtgcaaggagaccactgaccacttctcccttttggaaatgatatcttctcttggtttccaagaaagcacactctcctggtcttcctcctacctctttgtccactcattagctgtatcacctgcacctttaacttagcatcatgcctaaaactgaactgctcctcttttccctgcagttgcccttccacctgatgtttttttcttcttagtaaatggtagcaccatctctctagatgtttaagttggaacgctgggagcctcctgattccagcccgaccctcactcctcaaatgctatatgcactcaactcacgttcattttgtcttcaaattgtatctcaaatctgcctagttctcatgactaccaccccaagcttttgcctggatgactgtagcagcctcctgtctggcctccttgcatccattcttgctccccttcagtgtcttctggacttggaaccagattcatctcttaaaatcccaaagcaaatcgtgtgactcttgctggagaccctccatctacaagacccagtccactccttcctacctcggcagccacgtttccttctattttctctcttactccacaccctccagccacacgtttttttttttttgagttccttgaatgccattctcacttcaggacctttgcatatattgtagcctctgtctggaacattcttttctttttccctagctgattctgattggacgttcatattctggcttaaatgtatttttctttggaaagcctttctgtcccctggcccaaaatagcacttctctgttttctcttgggataacccttttctttttcttggtagtacatgtcccagtttttaatcacacacagacggtccctgactgtcaacttaggatttttctacttcatgatggtgtgaaggcaatacacatccaggagacaatgtccttgaaattgtgaatcttgatcttttcccgggctagcaatatgcagcatggtactactctctcatgatcctgagccaaatcatttaacacaaaccccattgtatagtcaagtgttgaatatctcatgtattttcttttctctaccttactttattgtaggaatacatatattcataacatataaaatatgtgttaactgacttcatattatcagtaaggcttccagtcaatggaaagtgttctgagcacatttaaggtaggctaggttgagctatgatgtgtggtaggttggctgtattaaatgcacttttaacttagggtattttcaacttatgatttgtttttctggacgtaacccctttgtaggctgaggagcatctgcatttatttgtgtgtttatttaacatctgtgtcataatgttacaggaaaggggtctgggtccagaccccaagagagggttcacgcatctcgtgcaagaaagaattcagggcgagtccgtagagtaaagtgaaaggaagtttattaagaaagtagagaaataaaagaatggctactccatagacagagcagccccaagggctgctggttgcccatttttatggttatttcttgatgatatgctaaacaaggggtggattattcatgcctcccctttttagatcatatagggtaactttctgatgttgccatggcatttgtaaactgtgatggagctaatgggagtgtagcagtgaggacgaccagaggtcactctcattgctatcttggttttggtgagttttagccggcttctttactgcaacctgttttatcaggaagatctttatgagccgtatttcttgccaacctcccatcccatcctgtgacttagaatgcctgtgtctgggaatgcagcccagtaggtttcagcctcattttacccaacttctgttcaagatggagttgctctaggtcaaacgcctctgacaataatacttcagactccttgagaccaaagaccatgttcttttgttcagcgctatgtccctattgtctctcccagagcctggcttccaattcatatttgttaaaataaaatgaaatgttatcaggcagcttagatctcataaagatattatatgtccacataaaaagtacagttggcctttgaacaacacaggggttaggaacaccaactcctcacacagttgaaaatccacatataacctttgatttcccccaaaactttactaatggcctaccattgactggaagccttactgataatatgaagtcagttaacacatattttgtatgttatgaatatacgtattcctacaataaagtacggtagagaaaagaaaatgttattaagaaaatcataaggaagagaaaatatatttactgttcattaagtggaagtagatcatcataaaggtcttcatcctcatgctcagtaggttgaagaggaggaggaagaggaggggttggtttagccatctcagtggtggcagagtcagaagaaaatccacatataagtagacccatgcagttaaaacctgtgttgttctaggatcaactatactaggtgggaagttctattaaaaataattcagacgataatagtatctaacatggattaatcattctatgccaggcattgtgctaagtgtcttataggcattatctcatttaatcctcccaacagcattatgaactaggtgctatgactgtgtctattttacagatgcagaaactgaggctcagataggctgtcatttgcccagagtctcacagagaaggagtggcagaggatctgaacctagacctgtctggttctcaagtttttaccccttaaccttgactctttagggccttaatgtaacaaaacctcagaaacagagactcagtaacatggctctttcggaggtcttgcctgagaacttgaaagttctcttgctttgagacagggagtagagcagatggaccacatgtaggcttctaatactggtgtcttttgaaaggtcctgaattgctggtagcacctggattttttttttttcacactgactctgactgctgccaggttttatggcatatctgaggtcattgtaagttgatgaacctctgggttgtaggggaaggagggaggttctttgtctttgttgttgggtgatgttgggtggtgttgggtcggaagatgacctcggcacctgcccgaagtcttcctatttcttccttttcctccttccccagggtctggagccagagcctggttttcaaattgcaagacaacgatctgatttagtgatttatccgattaggcttaaatgtatttattacatgcttaaacatattccagtgagctctgaaaacgatccgcaggtctgtcctgggctgaatttccgggacccactggagcaagttcaagaaaagcataatctacttagaggaaaacagaaccagaccctaatccaatcagcatctgcgttaggcagaacatcccccgcctcctgtcaataacctcagtgcccccaaacctttatctggagtttagaagagatcgcagggaggtaatcttcagggggtccaaggtcacctagactttaacgctcctctgatttctccctctcatagagctgggtaggggggaacccttagctgtcttctagttattgttttaaagtaacatttctctttttgatattaaaatggtttttgtttgtgaaaattttgaaaaatgaagaaatatgtaaaaaaagaaaaccaaatcacccataatcttgctcatattcgcattttccggtgagtcttttcaatatttaaaaatgctttcaaaattacccaagtaaagggattacattttaattataaaaccttttaggcttttttcctatgcatttttaacaaagcagaaatggtatcaaattatattgattatctgatgccctttttccttcccttctttttttttggagggccatgtcattaatttttgaaaatatcacgcttaatagctataccctgtttccttcctgtgaacagggggaatttgcataagtattgggttttggttatattatgctttttggtttttctttttgctattgttttttgaacgagtgattatttttgctattattgacactactactctgaatatttttgtattacctattctcattccacttcttttgaacgtgagattttttttgacagcttaactgagatataatcaacatttaatcagctgcccagatttatagtatgcaatttgatgagctttgacatatgtagatacccaggaaaccatcaccataaatcaaaagagtgaacatggcttttacccccactgtgccctccagcatccttgttctgtgtgttgaaataacctcaccaggtctaggaggctctcagcaactctggatccctgaggcacctacgacgccctctagggcatgccctcacttagaagatgccgtagtagatgtttgctggatgaaagaatgcaactaaactctgctgggtgtgtagatacctagctggtgtacacctgcagtgacggggaacttcctcccaaataactcagtccccttccacagctagcttgttctgggtggtcaatccttgattgagctcaaactggccttattcccctgagcctgatgctacatattttggccacagtgagggggcggtacagacctagcccctgatctcatagagctcatggtttcttggtggggatggacattgaacaactaatgatgtaactcatgactgaaccccagggtgagcaatgctctggaaaaaaggggtataagagctataaaaacttgtggtggggagctggtgttttgggggctgccctggtcagcaaaggcctccatgtcatgcttcatgatagccttttatgtctctttgtcattttctcttccctggtctaaacattatgagttgctttggccacgtctccattgggcaggattttcagattcttcatctcctgcctgctcttttgtcatccttgcacctgcagctggggaacactaagatccctgtctccaaggacatttgcctaatcatgcagccaatgacagcaggcgttcctcctcctctagccacagaacgttttcagcaggatcaaaggctggcttagaaacgacaataaccacaatgaaaacactgccacccatgaacatttatcacatgcttctcaggtggcatgccctgcactaagcacttgctatgggctcattcactgcgttctcccagccacaatatgagctcaaacctctgagccaaccttttacccataggctgtgctgtgagtcgtttgtgtctcttagctcccttctttctcatagcaaccttgccatttttattcttctcactttacagatgaggaagttgagggagagaggttaagccatgtgccctagggcacacaacgtgccctaggccacacaaaccctcagagtccttggttgtagcctctgagcacatactgtctctgctaaggttcccatttcccaggtgaggggattaaggatcggtgatcagtggggtaggaaatcttccaagggccaaatggtgacattaggatttggccctagcagtgtgaccccagagattgcccattgatccctattctactctctacctctgatttgagggacatattggataaaccattggaacttttttttttttatttttttgaaacagagtctcgctctgttacccagactggagtggagtggtgtgatcttggctcactgcaacctctgtctcctgggttcaagtgattctcctgcctcagtctcccaagtagctgggattacaggcatgcaccaccacgcctggctaatttttgtatttttagtgtagacggggttttactgtgttggcccgccttgtcttgaactcctgacctcaagtgatccacctgcctcggcctcccaaagtgctgggattacaggtgtgagccaccgcgcccagcctggaacatcttgaagaaagggatttggatggaggagatcccagcccctgtggggaaaaggaatctctctttatccattgtcatagcctcctgaggtataattcaggtcttgtgtatagcatgtttttaatcaatgttggcacacaaatatggggacagggattggggccattgatagcaagagttaataatattatattattagtatatataaatagtattatcaggtaatattatcatgaggtcagatcctggagcagggtcctttctttaaagaggggtgagctggctgtgggaaggtaacttgttaccagccgaaatgtgtgatctggagtaagtgtcctgccaaccttttccttttctctttatttattgagtcattaattagagccgtctaatttcccgtgctgtttttacttgggaacatcggtgtgggcggggggcggtgattgagagagagagaaagagagagagaacaaatcattatctcttatgacacactcagagtctaatgaagttttgctagaatggttttgaaattcagatgcaaatagacagtaggtcttaagggactgctctttgtcagcaaactttattttccggaggaagacagaccttcacggaaaggctgtaacagtccttaaatggcttattgaaactttttcatgaataagagttgaagttgattgaaaactgtgttctgggatttctggaaagatttggcaaaaggatattcccctcccctggcctggtcattgcaaacagaaatgcagccatccagctgttcatctttccattggtttccttggaaagccaaatggaaagaagaagccaatggaaagatgaacagccagatggatgtgctgccttgtgtaatggaatcacatgggaatccatccaaacagcactgggttggaatttcagctctttgccacttatgagctaatgaactatgggcagacccactttagttctggaagccttgttgccttatctgcaaaatgggggtgatgatcgttctttgccacaggatggttgtgtgaattaaccaaaataatgccctgccttctagtaaacactcagtggacgcagctgttagcctgggtcagtttctgtgctgtgcactgaggatccaaggatgaccatgcccttaaggatgacacgggtttctagaggaaagtgatgtggaaattaattagtatgatgaagatttgtacctgctagggtccagggtctgtgccctcagccatcatggccttcctagggttctatgatgactaagaaaagacaaagccaggtcacagacacttgtaaaatattattgcaacaaaccactccaaactttgtggtgttaaacagtaacctttttcttatgctgtggaatctatggatcagcaattgggacaggacacagaggggatagtttgtctctgcaccatgatagctgggtgctgcaatcatctaaaagctcacccattcacatggctggaggttgatgctggttactggctaaagcctcagctggggccgtctgcagaactccaggtggctgcttgggcttcctcacagcatggtggttgggctccaacagtgtgtgatccaacagaacctggaggaggtgcatggcatttttataatttagcctggtaagtcatataatgtcattcccaccattctttattggttgaaggagtcacaaactcctgcccaagatcaaggggtggccttccctgacttcttggtttacaattgcaaccttgccctcttctcacctccccaacacacacacacacacacacacacacacacacacacacacacacacacactttattttttttttttgagacagagttttgctctgttgtccaggctggagtgaagtggcaccatcttggctcactgcaacctctgcctcccaggttcaagcaattctcctgcctcagcctcccgagtagctgggattacaggcctatgccaccatgcctggctaatttttgtatatttagtagagacggggtttcaccatgttggccaggctggtcttgaactcttgaccttgtgattcacctgcctctgcctcccaaagtgctgggattataggcctgagccactgcgtctgcgccccccacacacacactttctatacccttcccaccatactttttcatagtacttacttttttttcatgcactctttagcatatatactgtttacttaatactcacattcttggtctagaagctctgtgaagataatgattttgtctatttgatttgctactgtatcctgagcatctagcaaaatgcctagtacatagtagtacttggtaacattaataataaatgaatatttataaatgttttattatgtacacggtagagtgctatacacactattctgcatgttgcttttttttcttatacatgtatcacggagactgttccatatcaagacatatagagtggtcttgatctttttcatggcttcctagtatttaattgtgtaatgatccctaattgtgtaatgatccaactggtctcccattgatgggcattgaggtcgattgcaatcttttgctgttacaaacacagcttcagcaatatctttttatgcttatgatttcacatgtgtgaaatatagaattgtaattgctgggtcaaagggcttgtgtgttttgcatttggatggtcttgccaaactgacctttgtggctaggtctaagagtgctctttcctgacctttcaatgagcctttctgttgttatgagtgaggttaagaatgttcatatatttaagagccatctgtatttccctttctgtgagccctttggccacaccctttgatcattttggcactggattgtttgtttttttattgatttataagaactctttacttattaggatattggccttttgctgtgacatgagtagcaaatatttttcctcctatagatacttattcagctggtctgagctagagcctggaaatttgtatcttaaacatgtacctgggtgattcaagtacagatggttcaggacccacactttgagggatcctgctcaaactagggatcctgctgtggttagcacaaggcaccgaggtagagttcactcttcatgcccctagacgcctcccgagtgctctctgaatggagcctctgtggaggaatgtggttccgctggaacattttggggagataagatctccaaagggaacttctttttacctggttgggaatattttgaggtacccattgtgcagtttatttaatctccgccctttgtcaggggtcttggtgtttgggaggggttgtcacagtgaaagtggcagagccccccaccctttttatcctgatggcaagatgattgaccacatctcccacccccatcctcccatgctccaggctcttatttatttatttttaattgacatataataattgtagatatttatgggattttgatacatacaatgtatagtgatcaggttagggtaattaccatattcatcatctcagacatttctcatttctttgtcttgggaacattcaatctctcttctagctatttattattaactgtatatattattgttaactgtagtcatcccacagtggtatagaacattagaacttattcctcccatctggctataatgtatctcttaataaatctctccgtatcccactcttccccttagccttcccagcctgttatcctctcatctactttttagttctatgagatcaactattttgcttccacctataagtgagaacatgtagtgtttgttcttagcttatttcacttaatataatgtcctccagttataccatgttgccacagatggcaggatttcattgtttttgtggctaaatagtattctgttgtgtatatatataccacatttcctttatccattcatctcttcttggacacttgggtcaatccatatcttggctattgtgaatagtgctgcaataaacatgagagtgtagccatctctttgataagctggtttcttttcctttggataaatgctcagtagtgggattgctggataatatggcaattctatgtgtagttttctaaggaacttccatactgttttctgtagtggctgtactagtttacattcgcaccaacaatgtatgagttcctttttctctgcatttgttatttgttgtctttctgatagtagccattctaactggtgtgagatgatatcttattgtggttttaatttgtatttccctgatgattagtggtgctgagcatttcttcatatacctgttggccatatgtatgtcctcttttgagcaatgtctattctaggtcttttgcccatttttaatcagattatcattattttttgctaatgagttgtttgagcttcttaaatattttggttattagtcccgtgtaagatagataattggcaaatattttctgccattccgtaggttgtctctttaatttgttgattgattcttttgctgtgtagatgctttttagtttgatataatcccatttgtctatttttttgcttttgttgcctgtatttatgaggacttattcataaaatcccttcccagaccaatgttctgaagccttttgcctatgtttacttctagtagttttaagtttaaagtcttacatttagatccttaatccattttgagttgatttttgtactgaatgagagatgggggtctggtttcattcttttgcatgtggctatccagtttttttttgacacctttgtcaaaatctgttgtctatagatatgtggattaatttctgagttctctattctgttccattggcttatgtgtctgatgtctgtttgtatgcctgtacaatgctgtttaggttattgtagttttggattatattttgaagtctggtgctggtggtgtgatgcctccagctttgttctttttgctcaggatgatttttttttttttttttggctatttggggtcttttgtggttccacacagattttaggatttttttttatttatgtgagaagaatgttattggtattttaatagagattgcattgaatctgtagatcactttgggtactgtggacattttaacaatattaatttttccattctatgaacatgggatatctttccatttttctcatgtcttcttcagtttcttttttcagtgttttatagctttccttgtagaggggactcttcttagctagcaaatgatgatgctgggaaatggagagtacaggaccatttactatctgaaattcattgtaataaattcaagaggagctgaagacttcgcttggaatgaattggacttggctctcctgtgtgctcaactgtctagatcaactctctaatagaaatataaagcaagccacaaatagtttaacatttttctagtagctacattaaaaaagtaaaaaagaaaccagtgacattcattttaacattatggtttttttagcccagtatatccaaagtagaatcattgcaacatgtcatcaatataaaatatttttacggagacattttaagttcttttattttgtgttaagtcttagaaatctgtgtgtattttatacttacagcccatctcaatttggttagctatgtttcaagtgcccagtagccatatgtgtctagtgactaccctattggacagggcagctgtagagctctcaaaggcagatggttggtgaaaatgaatgccaacaagaatcttctcacattgggaccttatttttttccaagaaaaatcctgcctgctccttgagcccaagctcagtggtctaacccccagcagagactgtcacttggcattctcagctggcctgctgaaggaggcaagaataaccacacttttttctaagttcaggcagcaggcaggttgtgaacttctaagtgctgcctgggagttgcctcaggtccctgcagaacctccaaaacatcttcttttctaagcaggtgactctaagtagagcttgaccaaatttagagctgtcctctttatagctatcaaaccttagctaattgtagtgataacattagtaactggtattatctttcactgacctcctcagtaagctccaggcttaccagagtcccggtaaactctgtcacataccttatctcactaatttcttacaattactctgtgatgtgggtacttctaattgccccattttatggaggggaagtggaggcagagagaggttaatctgctaagtcctgtcttaatgggaagcagttcttctcaaacttgagcatggatcagaatctcctagagggctggtgaaaacacagatcgctgggcttcatgcccagaatttctgactccatatgtctggggcggggcctgggaatctgcattaatagcaagtcctcaggtgttgccgatgctgctggacagggggccacactttgagaagcactgtgctaaagttattccttcccccaaattgtatcccttctagtatggttgaaggaactagagatagtttcctgaaacagaagtggggaggggtatagtcacgtcccattgtcacctgtgagaagggctctacggggcagaggaggctgtgttgtgtgggtgtagagggcagagcagggccaggagggcagaagtcaccctggccatagtttgggcttcattaaagcaagaactttctatttgccaggcctgccctccaagtacgggccttctgaagcaccagtcaccaaaagggtttcatccgagacccaggcattggttgggaagcaaccaattgatgggtcttttgatgcaattgataaagactcatcaatttatcaagtctgatcctctttgaaagatatcacagcacattttaatttcaatttaacttaattttatttcatcccacaatcatcattctcatgtcttcatttatttttagctttgtttttataagctcattaactttactcatctcttttcatttctattttcccttttctaaaaggaaccaaaaataacaccaccacccccaaaacaaaacaaaacaaaacaaagacaagctggaggtctgggatggttaaacagtttaaccatcttcatactgcagcatctgtccttcatttcttctgcatattagcttggaatgttaggatgagggctaagaaatgataatttaattgccagtcggatatcacctttaaaattgagacagggctggatgtggtggctcatgcctgtaatcccagctctttgggaagccaaggcaggagaatctcttgagcccaggggtttgagaccagtctgggcaacgtagtgagacctcatctctacaagaaattaaaataattagctgggcatgatgatgcctgcctgtaagtcctagttactctggaggctgaggtgggaagattgcttgaccttgggaagtcaaggctaccatgagctatgttggtgccactgcactctagcctgggtgacagagcgacaccctgtctcaaaaataaataaataaaataaaattgagagaggatttattttcgtattaaactggcagttgatggagatactgtagagtgcagattaatagagtgatagttcctgaattatgtgggttctttgttatatgactgcagtgaggcaaaacaaaaaaacaaaacaaacaaaacaaaagacaaaaaaaacaaaccgagatcagtttgttaggttccattggttagcagctcactggtggccagtccttgagggctgggggcctcagcaaaggctcattcgggctctacttcctcctagctgagagctgctgttgacagagctgcagagactgaacctcacaaatgcccacagcctccaaaattcatctttaccctctcttcagtcacttgaatcactttctgctttctgaatcactaagtaaattggggtcaaattatactgtccatcccctgagttctaatcctcccatccccatccatttctcactgctggcatctgatttgcctctcattcattaagtatttattggattatttatttttcagctcctgctaggagctggatgctgggctgggcgtgagggatacagcagagaacaaaatggacaaggcctctgctcatgtgagacttacgtgcaagctggggagacagccagcaaaccagtcaactgattcataatataatttcagtgagtggcactttctatggacaaccacaaacaagtggggcaaagcaacagagagtgatgttgatgaggcaagggggttattttagtttaagtggccaggaaaatactttctaagaagctgacatttatgtcgattggtgaatctcaactgggggtgatttttgcacccctctcttctgctcccgtggacatttggcagtctcaggaggtaggttggcttgtcacaaatggggaagggggtgggggtgctacttcgcctttctagtgggtaggagccagggatgctgcctaacatccttcaatacacaggacagcgcaacccccatcaacaaagaattagccagacccaaaagttaacaatgtcaaagttgagaaaccttggcgtagaggtatgaatagggaagaaatttccaggaagagggaacagcacatctaagcccctctggtgatgtattagttaaggtaatgctgattattgtaaaagataaaccttaaagtctcagtagctgaatatggtagaagtttaattctaatttaggtaaagactaaaaatggatgctctggattagaggcggggggtggggagtctgctccacatggtcattcaggaagcccaggacccatgctctaccatcttcaatgtgtagttaccagggttgccctggatattgacacccagaaggtagactggggagaaggggaggggaaaaggagagggtgtgtaagattgcacaggagttcttactgaccatgtctagaagtgctctaatttgctgcatccgtattccattggccagaactctaactgcaaaggaggctggaaatgtcatctagatgtggcctgggaggaaggagcttgtggtcagctagccagagtgggaatgagcaggtttcattggaaggatggcaacgaattcaccagggctggaatggatgggagaggagaggggtgtaggagttgaggatggagagatgggcagaggcttcagattgagatgcaattagacatgctacgttttcttagtgatcatggaagtaatcatgctagtgagatctagcagggattgggtcccagctgcggaccaggccctgggctaaaccttttccaaaggaaaatctcatttaatcctcataccaactctttgaggtagtcactattattactcccaatttagagatgaggaaattgaggtttagaggggttaaataacttcctcatttgattttccaaccttgatttcccacttatcgaggttggagctgggatttaatcccaggatctaggaggcgggggtggatactgtaggctaagaggttctcaagcttggctgtgcatcagagtcacctggaatgctttgcaaaaacactgatttctgggctctgcgtctgtggttctgctttggtaggtccaaggggcccctggacagggccatacatgacatctagactcattataatccacccagagcggcccaaggaaatgccatactttgggctttacacaattggagtcaagaggggagagaaacagactcctttccttcctccaaggaacatgcaatgtggctgagaaaacaagacataaagcctggaactttatcaatccaagagattatgaaagttcaacataattatttgggagctgtcacaggcagagtgcaatttattacctcctgaatggtgcagaccataaatttgtaggagctcaaagaaggagacatcactcttgactggagggggctggaaaggtttgaatgaagggaactttgaggcaaacactgaaagagcggatttcaggtgttgttattcttgtttacttattagcttgttaattacctatctccacttactcaaatgtagactttttgaggtgcaggaatcacaactatcttttccaccaccacattctcagtccttgaaactgtgcctggcacatagtaggttctcaatagatatttgttgaacaaagaattcaagatgtgtagggatgtttatgatgcatttataggtcagtgagtttcctcccctagaaatatttccttgatcagatgtgttaaataaatgagtatagttttctttcctgcaggacttctcagagcctttaatttgcaaacttgcttgtagaatctccaaaaatgggagctgatatttggtgataacccaaacttattagagcattgggtctctctttcccatagaacctgttaacacattgtggaatagtattattcggtggaacccagtttatggaaaccttcgaaagtgacagtgggtttcttatgtctcttctctccctctctctcttttttatacgctgcatctaagccctcactctggttttttagatgtaggggagatgccctggtggttggtggaatttggaggtgggtttctaaaatacactcggtttccaagaggcccgggaatcacttgcttcattttctcccggctttgtttcttgagcaggtcatcgggtgagagtgaggctgtctcactgctcagcttcactcctgttaggtttgatcaggggctcgcagcttcttggtggcactgcagattccccaccatgaaaaggaagtgtcacagctgctccagctgacgctgagcggggctgagcggaacaggcgcctgtgtctccatccttgtccctccgtaatggatcctgacaggggacgggcacggggacaggcactctgggaagtgagaggcttgttcttgaggccccagcctgtacagcaggtgaattggagtttcgattcggttcaccgagcactagtgtctcaatgtaacttaaaagaaatgagatatgcgtgcatgctgcaatgtggatgaacctcaaaaagattagacaaagtgaaaaaagccagacacaaaagggcttgtactgcaggattccatttctatgaaatgtccagaatgggtaaacccatagagccagagcagatgggtgttgccaggggctgagaggaggggacatggggagtgactgttattagtgggtctggggtttcctctgggggtgatataaatgtttttaagtagatagaggtggtggttgcaccacattgttgactgtaaatgccgttgaagtgtctgtgtgaaaatggtcaatttcatgttttgtaaatttccttaagataattctatattgaagtccttagtctgcttctgccgacttagagagagggaaatggagccctagacgaattttaggatctggtctaggctggagccatgagtctcgctcctggttgcagttagtcacctggggagctttgaaactctggctgcctgggcttcactcctagagctgatttaattgggctggggtggcgtctgggtaccaggattttaaaaagcatcctgggtaattctaacttgcaggggattggaatatgccgcatgtgagcagcaaagccccgggccagggcaagtgcctccggaatcccatattcctatcctgtgatctgtccttatactcatctccctcctgagccttaacttttaggaaatgccggacgttgtttaaaacggcgctccacacacttaatgttcacatgcctcagctggggatcatattacattaatttggctgcagcaggtctgggattgggcatggaacctgcatttcttttctttctttttttcttgtttctttttttgaggcagagtcttcctctgtcacctaggctggagtgcagtggcacaatcttggctcactgcaacctctgcctcctgtgttcaagcagttcttgtgcctcagcttcccaaatagctgggattacaggcacacacccccacacctggctaatttatgtatttttagtagagatggggtttcgccatgttggccaggctggtctcgaactcccgacctcaagtgatctgcccgccttggtctcccaaagtgttgggattacaggcatgagccactgcgcctagcctggaaacctgcatttctaaccagcttctggaggatgttgctgctgctggttaggggaccacacttagccagggtctaaaatatgagcaaatcctcacggtgcaaattcaggttcagagattttgaagcatagccagcacaaaacagttattgggtaccaggctcttttgaatgggctctggttgttttaactcatttcatcatgacctgaaccctttgaagcaagtatttctattgtccccatcttacagatgaagaaactgaggctcagaggcaggcagtaacttgcccacgtttatatgactagcgagtgtagaatctgtgttcttaatttctacccttcttggtctctagagaagttaccagggaaggccacacctgtgtgtcttggcccaaggtggttcaaagatggcttgagtaatattcagagtctaaattcagcacagccaagttagtccctaaaaaggtgtgtgtgggagattagcatttaacaagaagttctcccaaattaaaagagctgtggttgacttcagctggacttcccatctgtttctggtggggtgaatgccaaatgtcttggagagggagtgatcaactcatcccagtttacccagggtgttcctggtcttagtactgaaagtcccacatccttggaaatccctcagtccatccgcgatggttggtcaccctacttagagcccaggagttctttcatggcttccacggatgctgagtgggctctgggcagcagggaaagatgggctaaggtaccccaagaggtctgactattcccacccgtatcttggtaaataacttggaccttttccaactgtgtgcctttggacatctctagaattgttctgtaatgagagggagagcagcttacattttcagaagagcttgttgaaggatgtggttgcaatttaaattctcattaagaagctggaaacattgaaagacctaagatattattaaatatgtttaaggatcttatgatttactgcaggaaacacaacgcttattatcttgaaggccggttccttaatggggtggctggaaagatttctttgtctttctcaaggagataaagatgataaaagcagtataataatagtataatactaaaacaacaaccagcaacagtagtaattattgttcggctgccatttactgggtattcagtgtagggtctccaggtggaatctaaacttgctggcaaatggtataggagcaggggtgagctaactttttcttaaaggaccaggtagtaaagattttaggcttcaaaggccatatggtctttgttgaaacgactcaattctgccattgtagtgtgaaatcaggtatagacaataaatggccgggtgcggtggctcacgcctgtaatcccagcactttgggaggccaaggcaggtggatcacctgagatcaggagttcaagaccagcctggccaacatggtgaagccctgtctctactaaaaatacaaaattagccgggcgtggtggcacatgcctgtaatcccagctactccggaggccgaggcaggagaatcacttagaacccgggaggcagaggttgcagtgagccgagattgcatcactgcaccccagcctgggtgacagagcaaaatcctgtctcaaaccccaaaaaacaataaaagaatggatatggctatgtgtcaatgaaactcagtttacaaaaatagcccatggactatagtttgttaaccccttatacggtggaaagataactgtctttaggagtcagagttaggttccagatgcagctctgccagtttcaaccactatgaccttggttaagtatgatcttaacctctctgagccccagtgtactgctctgtaaaatggggacaatgatgggcccagcctctcaagtttgtagtgaggattaaatgcatggccggaaagacagaatcgtagctagtgctcaataaatttcaactcttttcttttttaaatttaatttaattttttttgagacggagtttcactctgttgcccaggctggaatgcagtggtgcgatctcggctcattgcaagctccgcctcccgggttcatgccattctcctgcctcagcctaccgagtagctgggactacaggctcccgccaccacgtccggctaatttttttgtatttttagtagagacggggtttcaccatgttggccaggatggtcatgatctcctgacctcgtgatccgcccgcctcggcctcccaaagtgctgggattacaggcgtgagccactgcgcctggccaatttcaactctctctataagctccccagcatggggtcgggggtacataggaaacatcttggtgctccttggaagataccttggcaaaaggtgaatatattgtataaactcttttctctgtggccttcaaatgccacctctctgccgtccgctcccagctctggaatggaacgctgtgttccttcccccaggtgttgcttaataaaggagaggctgaagtcctcctctctctttgttttcatgcccaataaatcactctgacaagggcttgttattacttaactctgtacattgtttcggcaatccctggtaggagagagaaaggcattattttgcccagaatcgcttcaggaatggaaatatttttttgtgaattaatattcatcaaatagatcaggtaaacatccagtaatgacaatgcatgggcaatttatcaattccagcttcagaatgcaattatcagtcaaatggcaccgaggcacagtaatgaagcctgcctgaaaaatcccattactcccagattggggggtgtgaagattcattcttcacttttatatgaagaatgacactgtcttgtcagagccggggctgggagtcaatatgtcgctctctcctgagcctcacacttggacaaggaattggcaaaccctgattccaaagattccacaggcctactggggtatctgtggggaaaagggggtgggtggggaaagaaagggttggaccctgaccaatgtccccctccccacccctgacacttggtttttcccagggggcctgctaagagattattctattcctggtgtcatcctcagacaaaccccagatatcagtgctattattattagccccattttacagatgagaaagttgaggctcagagaggaggagggaattccttgctgtagtagtcagaataatgaccccctttccccaaagatgcccatgccctcatccccagggacatctctgaacgtgtgacctgtgagtatgtgacctgtgaatatgtgatattacatagtaaagggactttgaaaatgtcattaaatgaaggatgttgagatggggagattatcatggatgatctagccgtgctcaaagtcatcccagaggtccttataagggaaagaggaaggcaggagggtcagaggtcagagtcagagagagaggtctgaagatgctacaccaacggcttgggagagggaggaaggggccaggaacaaggtatactgatggtctctagaagctggaaaagacaaggaaacagactctcccctagaggtcctagaacaaatacagttttctttacaccttgatttttgcctagtaagacctattttgaaattctgatctccagaattttaagataatgaatgtgtgttgtattaagcccctaatcttattgtcataggaaacttacaccatgcctttttgcaaatgtatcccacgccccttccattgccttttcagtcacccttttcttagggacaagttttcatggtgagcaaccctggtcatatacaattcttcagccccagggcctcttgggaatcccaggccacctgctgttcttcttccccccacggtacttcctgcttccctggacctccctggccccttctccatctgatatggtttgggtctgtgtccctgcccaaatctcatgtcaaattataatctccagtattggaggtagggcctgatgagaggtgattggatcatgggggtagatttccctcttggtgctgttcttgggatagtgagtgagttctcttgagatctggttatttgaaagtgcgtgggacctcctccccacccaaccccactctggccatgtgaagtgctggctctctctttgccttctgctaggattgtaagtttcctgaggcctctccagaagctgagcagatgccagccaacatcatccttcctggacagcctgaggaactgtgaaccaatgaaacctcttttctttgtaaattaccaagtcttggccaggtgtggtggctcacgccagtaatcccagcactttgggaggccaaggtgggtggatcacttgaggccaacagtttgagatcagcctggccaatataacaaaacctcgtctctactaaaaatacaaaaaaaaaaaaaaaaattagccgggcatggtggcagatgcccataatcccagctactcaggaggcagaggcacaagaatcacctgaatccaggaggtggaggttgcagtgagccaagattgtgccactgcattgcactccagcctgggtgacagagtgagactcagtcttaaaatataaataaaatatgtattacccaaaggattataaatcattctagtataaaggcacacatacacacgtatgcttattgcagcgctatttacaatagcaaagactcggaaccaacccaaatgcccatcagtgatagactggataaagaaaatgtggcatgtatacaccatggagtactatgcagccataaaaaatgagttcatgtcctttgcagggacatggataaagctagaaaccatcatgctcagcaaactaacacaggaacagaaaaccaaacaccacgtgttctcacttataagtgggagttgaacaatgagaacacatgaacacagggaggggaacatcacacaccggggcctgttgaggggtgggggaaaaggggagggagagcattaggacaaatacctaatgcacgtggggcttaaaacctagatgacgggttgataggtgcagcagaccaccatggcacatgtatacctatgtaacaaacctgcacgttcagcacatgtatcccagaacttaaagtaaaataacatttaaaaaataaaaataaataaatcacccagtctcagggatttcttaatagcaatgtgagaatggactaatacactatcctattggaatctgcttttctccagctgagtagccactgaacttggcttctccagctccccaaggcttcttttccccaggggataagcacccaggcctctgtgactcttggacgttttaggctttggggggggcagaataattaaaaatagcacatgaggaaccacagacaggaacctggccctgtggaaagggccacagagaccccccaggacccacccaacatgtatagtgggctcaataaaccagctcataacagcaaccttggtccctcactcctatggccatctgagatggtgtccagcagacccctccggcttctgcccttcttcctcctggccctgcccagaggtgagctgtaggcccccaaagcagcctagtcacaggtggtgtttgggcaatgtacatacaaagggccttcagaaaggttgatgttcttatgtacccaaccttggaagatgtcatttggatgtttccttgaagtctctacatagagccattgtcactgaattatcacctctactgtcatcttgcaggcgtccagcctcgtttcatagggctaagagcctgagtcttggaggcagattacgtggcctcctcttctgccttttttacactcaacctagcacagctcttggaggtggaaaagaattttggtgccttttaggtgccccagagtctcaacaatcatcactatttattcaacactaagagccggggactgtggtttgcatccattatgctcacaaccacccttagttgtgggtactattatagattagaaaacaggctcagagatgttaagagagttgcccaaggtcactcagcttgaagtgactgtgctgagcctcaataccagtccgcttgatccctgatcccaaccctcttaattttgctgttagaaagaataaggacaatgtccatgcatcatctatgattaaattttttttattatggtaaaatagatacaatataaaattgtgccattctgacctttttttttctttttttttttggtggagtcttcgctctgttgcctggtctggagtgcagtgatgcgatctcggctcactgcaacctctgcctcccggttcaagctattctccagcctcagcctcctgagtagctgggattacaggtgcgtgccaccacgcccagctaatttttgtgtttttagtagagacggggtttcaccatgttggccgggctgatcttgaactcctgacctcagttgatctgcccaccttggcctcacaaagtgctggggttacaggcgtgagccaccgcgcccagcccattgtgaccatttttaaagtctacaattcagtggcattaagtatttacaatgttgtgcaatcatcaccactatctatttccaatacatattcatcacaccaaatagagctctgtacccattaaggaatcacttaatacctgttcttctctttttcccagcccctggcaatccactatggatttgcctattccagatatttcagataaggggacttctacactgcgtggccttttgtgtctggcttctttcactcagcatcatgttgttaaggttcacccatgttgcagcatgtgttagaacatcattcctttttaaggctgaataatattccactgtatgcatatactaccttttgtttatccatattttcattgatggacactggggttgtttcttcttttgggctgttgtgaataattattctatgaacatggatgtacaaagagctgtttgagtctctgttttcagttattttgggttgatatatatatatatattttttttttttggactttttgcctacctcccccttttcctcctcctctatttctttagtaactttttgttttgtttcgttttgtttttgagacagagtctcactctgttgcccaggctggagtgcaatggtgcgatctaagcctactgcaacctccacctcccagtttcaagtgattctcctgcctcagcctcctgagtagccgggattacaggtgtgtgccaccatgcccagctaatttttgtatttttagtagagatggggtttcaccatgttgcccaggctggtctccaactcctggcctcaagtgatccgcctgccttggcctcccaaagtgctgggatgacaggcgtgagccaccacacccagcttcctctgtttctttaggaacttcttagagcctcctctcaagacttgattagcctgcagctggaacaggaaccagtccaggcagaagcgcggatatgagagactgagtagctggcaccaggcagggcagcttcttctccacttttcccttcaggacaggtagccccacccctggtgcctttgctttcttaggaatgcagtcttcaggcatgggctgtaggaagatcccatttgatgcttcaaaggtgagaagaaaaaaaattagcttttgagatagctagtcaatctggtcagtgacacgggatcagggcccccatgctgcccacagcacttcacactttccggtcaaggcatttacccctgttctacatcatccagtctttttaaaatatcaaagcgacaggctgggtgtggtggttcatgtctgtaatcctcgcactttgggaggctgaggcaggaggattgcttgagccccagagttcacttccagactatgaaacatagtgagaccctgtctataagaaaaacaattagccaggcatgattgtgcgcacctgtggtcccagctacttgggaggctgaggtggaaggatggtttgagcccaggatggtttgagcccaggatggtttgagtccatgattgcgccactgcactctagcctgggtaacagagcaggaccctatgtcaaaaaaaaaaaaattgaggtgaaatttatataatataaaattaatcgttttaaagtgaacaattcggtagcattgagtacattcacagtgttgtgccattatgcctctgtctagttccaaagtattgtcatcacaccaaatagaaaccccgtagccattaaacagtcgctcctcattccctccttcccacagtctctggcaactacccttctactttctgtcttaatggatttacctgttctggacatttcctgtaagtggaatcctgtaagatgtgacactttgcatctggcttctttcacttatcaaaatatattcaagattaacccaactatggcatgtatcagtactttattcctttttatggctgaataatattccattgtatggataggtcacattttattatccattcctctgttgatggacatggtgattgtttccaccttttggctattgtgaatagggctgctgtgaacatttgcataccaagatttgtttgagcacctgtttttaatgtggggtatatgcctagaagtggaattgctgtcctgtggtcattctatgtttcacttttttgaggagccctaacccagtctttgtgtgatgatctcttccccatccgcatggtgagctctggggatcaggggctgggttggctttgttctttgttgtgttcccaggctccaattcaaagctcggcactcagtaggcacttggtgaatgcttgttaaatgagtgatcaggggaattaagaaactttgggctggcctccttggctgtggagttgctgggcattttggaggctgggcagcaggtctgggactgaatgccatgggggttctatcaacatatgggttgagctggagatctacggggttaattgagccatagtgtctcttgttttccttaagccaccttgttaaggggaagcagaggtaagttgcatcttgtgagcccttcctggcacgtttatcatcccctctactctggaaactccacattcatttcacagctgaggaaactgagccttggggaaatcaagggtacatgcctggtaagggcagggctgggatttgaacttagacctgtttgactgtgaagtccgcagtcttcgcccaacacgatgagattcctttgggtgtaaaatatcactgggagcttccacgaatgtagcatgggtttggaaatttatagggcagcttatatcccttccacgtttgtctaacgtgatgctgatggtaatgacaacttgtttttttaccttatgcctgggatgtaatttcctgagatcatttcgtttagtcctcaccatcaccttactaggcaggtattattctccccaatttacacactaggagactgaggctcacacatgcacttgctcacagaggcctaactagtaagagacaatgcttgtatttaaatgcaggccagctgggcatggtggcttccgcctttaatcccagcaccttggaagccgtggcaggaggactgcttgagtccaggagctccaaggccagcatggggaagctagtgagactcccccatctctacaaaaaaattaaaaaattagctaggcatggtggcacatacctgtggtcccagctacacaggagtccgaggttggaggatcatttgagcccagatggttaaggctgcaatgagctgtgttcataccactgcacttcagcctgggtgacagagtgagagaccctgtctcaaaacaacaacaataacaacaacacaggctttggccagatgtggcggctcatgtctgtagtcctggcgctttgggaggctgaggcaggaggatcacttgagcccaggagtttgagaccagtctgggtaacatagtgagaccctgtctctacaaaaaattgatggcatacacctgtagcctcacctactcgggaggttgaggcgggaggattgcttgagcctgagagttcaaggctgcagtaagctatgattgtaccactgcattccagcctgggcaacagagcaagaccctgtctcaataaataaataaaaaccacaggcttctgtctccaaccttcactcactctgaattcttgccaggaagctgtcgcaacctctttcctgcatcttggaggcaaatgtcattctctgggagctggggacatctgtgaagattctgggtcctttccagagggtcttggtgtcctgacaatcctgagccatttctctgaatcttgtgctcttctggcattccagtctgttccacttggcatgctgagctccgtgtgaaaaggtggcatcatcttccagaaggctgaggtagtatctgccaggaggaggcaaagatgatgtcgccaggaaggtgacaccattgacaagttggatttcgtctatttctaaaaagtctggaggtttttcaaaccttgtgcccatcatccctgaagtgtacagggaagaagaaaatggtcccagaaataaagaatgaatttcttccgaggcactgtcaacagcaagggacccgtttccagaggctggaagaatgatgagtcggtgtcctttgccgtgcaagtcagaatgatatgtcttgggggcatttctctgctaaaggaaagaagcatgacaccaacttagaattaggggcactcttgtggcaaatgaagtcctggaagttactggggctggaagtcaatcactttgctgcagcttggggaaaaccattagcagtgttctctgatactgtagttaggctgtctctttctgtcccttgctgggccgcctctggacaagagccctctaatcagctgtcactatcatcaactggctaagagtgatgggtcgtagcgaggcttttctcccccttgattaaagttggtatatttccccgtcctatttaaagtgactattctgtgtgtgtgtgcacgttgggtgtgtgtatgcatgttggtataagtgtgtgcatattggtgtgtatgtgtgcatgttggtgtgtgtgtgcctgttggtatgagtgtgtgcatattggtgtgagtgttttgagtgtgcatattggtgtgtgtgtgtatggtgtatgtgtgcatgttggtgtgagtgtgcatgttgatgtatgtgtgcatgttggtgtgtgtgcatgttggttgagtgtgcatgttgtgtgtgcatgttggtgtgtgtgcatgttgtgtgtgcatgttggtgtgagtgtgcatgttggtgtgagtgtgcatgttggtgtgtgtgcatgttggtgtgagtgtgcatgttgtatgtgcatgtgtgtgcatgttggtgtgagtgtgcatgttggtgtgagtgtgcatgttggtgtgtgtgcctgttggtgtgagtgtgcatgttggtgtgagtgcatgttggtgtgtgtgcatgttggtgtgtgagtgcatgttggtgtgtgtgcatgttggtgtatgtgtgcatgttggtgtgagtgtgcatgttggtgtgtgtgcatgttggtgtatgtgtgcatggtgtgtgtgcatgttggtgtgtgcgcatgttggtgtatgtgtgcatgttggggtgtgtgcatgttggtgtgagtgtgcatgttggtgtgagtgtgcatgttggtgtgagtgtgcatgttggtgtatgtgtgcatgttggtacgagtgtgcatgttggtgtgtgcatgttggtgtgagtgtgcatgttggtgtgtgtgcatgttggtgtatgtgtgcatggtgtgtgtgcatgttggtgtgtgcgcatgttggtgtatgtgtgcatggtgtgtgtgcatgttggtgtgagtgtgcatgttggtgtgtgcatgttgtatgtgtgcatattggtgtatatgcgcatggtatgagtgtgtgcatgttggtgtgagtgtgcatgttggtgtgtgcatgttgcatgtgtgcatgttggtgtgtgcatgttgcatgtgtgcatgttggtgtatatgtgcatggtatgagtgcatgctggtgtgagtgtgcatggtgtgtgcatgttgtatgtgtgcatgttggtgtgtgcatgttgtatgtgtgcatattggtgtatatgtgcatgggataagtgtgcatgttggtgtgagtgtgcatgttggtgtatgtgtgcatattggtgtaaaggtgtgtgcatgttggtgtgagtgtgcatgttggcgtgagtgcacgttggtgtatgtgtgcatattggtgtaagggtgtgtgcatgttgatgtgagtgtgcatgttggtgtatgtgtgcatgttggtttgagtgtgcatgttggtgtgtgtgcattttggtgtgtatgtgtgcatgttggtatgggtgcacagtggtgtgtgtgcatgttggtgtgagggtgtgtgcatgctggtgtgtatgtgtgcatgttggtgtgagggtgtgtgcatgttgtgtgtatggtatgttgcatgttggcgtgtgtgcatgttggtgtgagggtgtgtgcaggttggtgtgtgtgcatgttggtgtgagggtgtgtgcatgttggtgtgtatgtgtgcacattggtgtgtgtacatgttggtgtgcgtgcatattggtatatgcatgttagtgtgtgtgtgcatgtttgtgtgcacgttggtgtgagtgtgcatgttggtgtgagagtgtgtgcctgttggtgtgtgtgcatgttgatgtgagcgtgtgtgcatgttgatgtgagagtgcgtactgttggtgtgtgtgcgtgcatgttggtgtgagagtgtgtgcatgttgtgtgtgcacgttggtgtgagcgtgtgtgcatgttggtgtgagggtgtgtgcatgttggtgtgagggtctgcatgttgtgtgtgtgtgcatgttggtgtgtgtgcacacaatgcaaaccaatatttgccttggtgtcttcacttccacagttctcagttatttttagggatgacgcaccccacatcaaaataactggttatttttatgattgggtgcatcaatcacattatgacatatcccaggtctggagaaatagcagccaaccagcagtcaagacagggaaagggagtaggatgattcagacacagggacagaggcagagggcaggggccgcggggctgggagaggctgctgatttgatttaagtgactgaggttcctaataatagcccttgtgggcttactctgtgcctggcacagtgctgaacactttgcatgtaggatcccttgtaattttgcgagaatcctctgagatagaggctcccaatatccctgtttcacagatgaagatgttgaggcccaaaagctaaccagcgtgcccaggtgttgcatgtagcgtaagcaggtctgtctgactccagaactgcaattcttcttcttcttctttttttttttaaagacagtgtctcactctgtcaaccaggctggagtgcaatggcacgatctcagctcactgcagcctcgacctcccgggcttaagcaatcctcctgcctcagccccctcgagtagctggactacaggacaggcacacaccaccatgcccagataatttttatttatttttttttttgtagagactgtgtctcaccatgttgtccgggctagtctcaaaactcctgagctcaagcgatctacctgcctcagcctctcaaagtgctgggattacaggcatgagccactgcgcttggccaaaaccgcaatgctttatcattgctccctttgcatcttacagagggaatgtcagatctttcaccttctagaagctccatgtatttatgcagtgggcactcattgtgggcatagtgctgtgcaatctgttttttgggagtagagagaaatatggggagagaagtagaagagaagtttctggttctaaaatacacagagtacgtttagttggtgaattaaaatgttgatatcggttgcaacacaatccatggatctgggcagtgtaggatgaactgcagtggagtttttgatcgctgatgcctccgttcctcagcctcctgtgtgtctcactcatcaccatgtcccattcaaatgtccttcaagttggtatatgcctctgctcccctcccacctcctccagcagccagagtgacctttctagaaagcacctctcatcatgtcactccttggctgaaaacccctcagtgtcatttccacagactggttgttccaatcacactgagctatttttatttttatttttttgccattcattcattcactcagtaaatattcgaggatccattataatgtaacaaactccattctaggcaataaacaagatagacaaagtttctgcttttaagaagcttatattccagttgggggagacagatagtaaatgaataaactggaaaatatcagagaatgactcagggctgtgaaaaagaatacatctttgatataatcgggagtgactgggaggtcaagggaggcttctttgagaaggtgacatgtaggctaaggatcggtgtgacaggaagcaagctcctgaaggatctggaggaagagctttgcagataggaagcaacaagtgacaaggccctggggtgagctggtgggcataaaggaaagaaggaagatcagtgtggcaggagatgagagttggggaagggtagaggtgggtgaggtgggagagatgtgggctatgctctgattagggagagaattgtaggcaattagcaagaatttggattctaagggaatagggagccattaaggttgataggaggggagtgaaggtctgatacatgattgcaaaacatccattgttctagtcaaatgggttagagaggagctagaggggagtcagagagaccagttgggaggctgctgcagttgtccaggtgtgaggtgagggtatttgggactgggtcacagcagtgctgatggacagaatagatggattccaggaatgtgcacagaggtagtgtggatgggtcttactgtggggtgggaggaaggagatttatcaaggatgactccgtgaagggaaaataaaccatgggctaccagaagcactaagctaaggcaaaagtcaagctggcaaacctgcctgccattttattccaaaataagatagctacaaagattaaaaagcgacatacttctctcacagtttgttccttgtggcccacaagatctttcccctaaaacagttctgttgaatttcaccctggcaatgtaaatgggtagctgatattcacaggtgcgggacagaaagtcatccctctgcttgcttgagacaaatgcatatctgattgcttcctctgccctattgtttaggtaaaaatgcagattcacggagccagactgaattgtgtatttagtggaaggctgatcaagaactcaaaagaatgcaaccttttgtctgtcatctacctgccccttgcctctagttgtcccacctttctggactgagccaatgtacctcttacacatgctgattgatgtctcctgcctccctgaaatacataaaagcaaaatctgtatcctgaccaccttgggcacatgtcatcaggacctcctgaggctgtgtcacaggcacgtccttaaccttggcaaaatacactttctaaattggttgagacctgtctcagatatttgggctcacaactcttatgttttggtcccatgcagtggagtggaaggcagtgctatgtatggagttggggaagcttgggaccttggcaggggtccaggtgtgacggtggaagcgtcagcccagggcattggtctagggtccagcgtgtcttcctccagatacctctaagatttagcaaaaacgtcatctcctcccagaaacccttctgaccagcaagacatgctgtgtgtgtgtgtgtggacaatactttgcaggctttatgagttgtctgtttacctaattttgctgtgtactcagcagggatggggaccttgtctgttttgttccctgctgtatctccaggtacctgacactcagtagtgctttgtgcaactaaatagaattgcttataggaggaattggtggaggggaggggcttccctcaagcattacgttttgaccaatgtgagggatagggagggactgaaggataggaaagaggccagcatgcaaggtggcaggaagagtcatattaagaaaaagatccaaacgtgggcttaaatgatctgggttcaaaccccagctctgtttctttctaccgtgtgaccttggccaacatcctttgcttctctgagcctcagttttgccaccagttaaaagggaatcgtggtagctgcctagtaagttttccctggtggatacatgaggcaacagaggtggaagcatctcagaggatgcctgggggaaaagtaagtatgtgcctgaattcgaatctgaaaggtctgagcaaggctggctccatgcagcctcccctaataacgccacctgggtcttctctggtcacaattactgacaggagagggctttgcagactgtatctacttcattaaggatcagatttctcttttgccttacagaaggcatccacctaccattttacggagtgagaagaaaaggtcagaattataggtgcttggagactaatttgcagtgagatgtacgaagtttagcaacttcaagtttttcaaaccctgaacgttcttaatctccaagtctagacaaattgcaaagtgagatcactggaccagcagcaacagcaacccctgagaacttgttgcaaatgcaaaatttcagacttcaccccagatcccaggtatgggaaacttaggggtggagcctaacgttgttttaataagctctccagggaattcagatacatgctcaagtttgagatccactagcctagagcttcctttttaatggagagagaatcatagaatattcaacttgagaagatcagctttgtcttctagtccaggtcatttgaaatgtgttctggaggccgggcaatgtggctcacacctataatcccagcactttgggaggccaaggcaggtggatcatttgaagtcaggattttgagaccagcctggccaacatggtgaaacactgtctcaactaaaaatacaaaacaaacaaacaaaaaagccaggcgtggtcatacgcacctgtaatcccagctacttggtaggctgaggcaggagaaatgcttaaacctgggaggcagaggttgccgtgagctgagatcatgccactgcactcccgcctgggcaatggagtgagactctgtctcaaaaaaaaagtgttctgtacaacattggagctcaagtcctacctgcaggatttttcaaagcttataatatgctaatgtgcttttttaatctccaggggagggttatagcatgcagtctttttcagatttcctttcaggactcatatcccatggtacagtttggaaaacacagatctagtccaatctcccagcaagtggacaatttgaagttaccttctgtaaatttctggttattcagcctttcctccaagtcttctagatacagggagttgctgaccttatgaagtcattcatttcttttgtttcagaggagatcttggtaactattagcatttgccttacagtaagctaaatctgttttcctttaatttcctcttggttttacctctgagtcctggaacctcctagaacaagtctaattcaccttctgcctgacagcagcaggaagacagctgttcattctccatctctttccaagacttctcctttctggttcccatcccatagacatggtctgacttttttagctagtgaagtatttagaaattgcttctttaaaattgcttatttcccacgtacagtttcaaagagtgattacaaagagcaaatgtttattattgagttgaaaggtatctcaagaattttctggtgtggtgtagtttatctctacttcatctatctgagacagatggcagttcatcctgttaataaagatctgggggagatcacacagtctttctggttagtctgctttggtgagtccagtggttttgctcatctgaaagctccttcttgtgcctagccacgtggtttacttacccttccactcctaaactatatttgcactttgctttgaccaaccaattaactggctttcttttttttttgagatggagtctcgctctgttgccaaggctggagtgcagtggcgcagtgtcggctcactgcaacttctgcctcctgggttcaagcaattctcctgcctcagcctcccgagtagctgggattacaggcatgtgccgctgtgctcggctaatttttgtatctgtagtagaggcggagtttcaccatcttggccaggcccatctcaaactcctgacgtcagatgatccgcccgccgtggcctcccaaaatgctgggattacagatgtgggccactgctcctggcctactggctttcttcttatctctcatttacccatttactcattcattccatgcacatttgagtatccattctgtgcctggtatcccacaagatgctacagagccaagactgaacaagaccaaactgatctgcacagaccttacagtctctaagggagaagagcaatgatcatataaacacataaatacacactttaaacttgtgctgagtggacaggcagtggcagagagtagtggggtagggacaaattcagatgagatggtctaggaaggaagcttgatgtttgagctgagagctgatatacataatttttttttttttgagatggagttttgctcttgttacccaggctgcagtgcagtggcgtgatcttggctcacggcaacctccacctcctgggttcaagcgattctcctgcctcagcctcccgagtagctgggattacaggcttgcaacaccacgcctggccaattttgtatttttagtagagacagggtttctccatgttgatcaggctggtctcgaactcccgacctcagtgagtttcactcttgttgcccaggctggagtgcaatggtgcgatctcgtttcactgcattctccgcttcctgggtgcatgtgattctcctgcctcagcctcctgagtaactgggattacaggcacccaccaccacgcccagttaatttttgtatttttagtagagacggagtttcaccatgttggctaggcttgtctcaaactcctgagctcaggggatctgcctgcctcggcctcccaaagtgctgggattacagccgtgagccatcatgcccagccaaaagatgttgttctaaatagatactagggtctgcttaagggtggagggtgggaggagggagaggatgagaaaaaagaactattgagtactaagcttagtacttgggtggtgaaataatctgtacaacaaactcccatgacacaagtttacctatacatcaaatctgcacatgtaccactgaacctaaaataaaagtttaaaaaataaaaaaaataaaaaatatgttagtatcatgggtaatatatgagtgagtgggacagcttgaatgcctgcttagtaaaaagtggaaaatacgattgaaaaaatatacttctttcttaaatgttgttaaaatggaataaatgtcaaaatttatctgcaaaaaaaaagatgttctagtaacttgtctttcatagtcttgataagaaatctcctgtcattcaagttgttgtccttttatctataatgcatcattattgtttttttaatggccgctttcaagattttctttggctttcaacagtttgattatgatgtgcctaggcgtggttttctttgagtttatcctatgtggggtttgctgagcttttagaatttgtgaatttatgtttttcacaaaatttgggaattttcagccattatgtctttaagagttttgttttgttttttgttgtttttattctgcaccaatccttcttaattctccagttagatcttttgaatgttagatcttttgatattctctaattgctccttggggcttttttaaagaaatcaatcttttttcctctctgttctttggatttgataatttctattcacctaacttcacattcactgactctttcctttgtcatctccgttttgatattgagctcatccagtaaatgagaacattttccaatgaattttggatagtgtatttttcgattccaaaattttcatttggttattttttaatagcttctgtttctctatgaaaattgctatcttttcatttcaagagtggttacctttatcttatggagcatggtcataatgcctgctttaaagtttatgtctggtaattctaatatctggctcatctcagtgttgctacctattgattgcttttttttttttttttttttttttttttttgagatggagtctcactctgttgcccaggctgtagcgcagtggcaggatcttggctcactgcaaccttcacctcccgggttcaagcaattctcctgtcttaacctcccaagtagctgggactacaggcacccgccaccatgcccagctaatttttgtatttttagtagagatggggtttcaccatattggtcaggctggtctcaaactcctgacctcaggtgatccacctgccttggcctcccaaagggctgggattacaggcgtgagccatcatgcccagcctgttgattgcttttgcgtttgaaaattggtcaggattttcctggtctttggcatatcacgcaattttggagtatctcctggagattttgaatatttttgtgagactctgggtttccttctggagaatattgatttttggtttgcttgttttgtttttcttaagcagtcagtagtctggttagagtcagactgtcggtgctgtcttgtcttctataggtggtgctccaatgccagttgagttcctaaagcctttgccatgcttcttagggtttattccaagtgtgggcagcatttcacacacagattagggctctcctccagttcttttcttttggagataacttgcacattatctggctttcaggggcctctttctccagttcttttggccaaaaagatagggttctgttagagttttagcctcttgtcttgttgcacagatctgaatgactggccttctcattggcggtaaagtggtgagagaaaagagagagaaaaaaacccatgggtgcaatggacttaaagatgatgcaaatagcagacactggggaccactagatgggagagagtgggagggagcaagtgctgaacaactccctatttggtactgtgctaattacctgactgtattagcctgttctcgtgctgctaataaagacatacgtgagactgggtagtttataaaggaaagaggtttaatggactcactgttccacgtggctggggaggcctcacaatcatggcagaagaggaaggaagagcaaagggacgtcttacatggtggcaggcaagagagcttgtgcaggggaactcccatttataaaaccatcagatctcgtgagacttactcactaccatgagacacagtatgggggaaactgcccccatgattcaatcatctccacctggccctggccttgacatgtagggattatgacaattcaaggtgagatttgggtggggacacagccaagccatatcactgagtgatggggattattcataccccaaacctgagcatcacacaatatacccctgtaacaaacctgcacatgtacccatgaatccgtaacaaaagttaaaattattaaaaaattaaaaaaaattctcatgtactcttccttaccttattcacataacattggcctctattctgagcttctcagtccaaaggaatgggatatcttttgggggctttggtgcctgtgctgtttctgtgtcatatgagtgcagttttgtgtctgggctgattttgggacatggctgggatagaaaaaagacacacacacataaaaaccccaaggattctgcccatactctcctactcacagatcttcctttcctggtcctctggccagaaatatgggatactctgaagtgtttactcctcatttccaaagcacagttcctaaatcctgccaacttttggccaaaactgacagatgaaggaaactcaccaccgccataatggccatgcttcagatgtggactcccctgccctacccacctgctgtcattgacttgtaggaatcctcaggttgttgccttttccattttttttcccagaatttttgggaaagataggctttggtgggcttgctctatcatggccagagccaaaactgggatgggtattttttaagtataaaatcactagaccctcaaaacaatcctatgaggtgggtgacactatccccattttacagatgaggaaacagaggctctgataagtgaatcaggatctaagccctcacccgattgctgttgtcgtgctacttggcaccttgctcaatgcgttgacatgatgcagaggctgtttccttgcttgccttatctcccctattccactatgggacccttggggtcaggggctacatccaccttgtccttcatccatgaaatcaagaaaatattaataactaccttgtagtgccgttgtaagggttgaattaggtaatatacatataatatttagaatagtgttgggcacacggtacactttccaaaaaagggtgatcatgatcattgtcatttttattttttccttggatattgaatgctgacagcaaagcaattgacatagggtagggctcagtaaatatttattaagttcagtccttggtgaaaccatttttatccttaaacaccatggatcttactttgttgtttcttttagaaacccatgagcattttttgcgattattatgtgtagtcccccattctacccacaggatgttgctatgtggggcggaggggtctagatgtcctggtcccattcttaccctacagcctttcctgttttcttctttttcttgctcaagttgaacttttctcacttctcccttatcgagaaataagaggaactctgggttcaaattttggctttttcacttaggaggtttgtagcttaaaacatgtaaaacacagacccctagaatctcatatatactttgtgaagaatagagtctaccccacagtgttgctgtgagaattacaatgaggtggtactcgcaaaatgtctagcatagttcgtggcacatagtagatactttaaaaatatttgtttctggttgggtacagtggctcacgcttgtaatcccaacactttgggaggccaaggtggatggatcacttgagtccaggagtttgagaccagcctgagcaacatggcaaaaccctgtgtctacaaaaaataaaaaagattagctaagtgtagtggtgcacgcctatagtcctagctactcgggagaccaaggtgggaggatcggttgagcctacaaggttgaggctgcagtgagccatgattgtgccactgcactccagcctgggcaacagagtgagaccctgtctcaaaaaaacctgttagtttcctcattaacatttgataataagatattcagctgcagtatgagaggagttactctagatacaggaggggagttctggtccagatactattggccagaagctgaccaaggcttctagcatctcaaaagaaagtacctgctccatagtatgcactcaataaagacatgtggaaagaataatcaacagaacaattcgaatttgctaccctatctcccagcatcagactgccctacagggttggtaactaggggtggaacgatgttaagcatgaacatctctgttgctagtatctaaacatgcttagttccactttacccgatgattttttatcagtttcaacggtttaattattgtttagacctgcagggatatttttagttttgcatttgttctttatctctgggttcggcagcatctccttttagagatatcctttggaagcattgtcaacctgacgtttgggctccagaggcaggctgggtgccagggagggttaactgctagggggactcatttgtgttggcttccttaggtcaagccagtaaaatatttattggtgtaaattttgtgccaggggctcagatggtttgaggatatggaagataccaagacatggtccctgagcatcaggaattcatcgtccagttgaagacacagacaagtttacaactcaaatgcagtgggtttggttcgtgaggggtgatcattggtgccatgacattgcacatggcactgtcctctggataaatcctcagctctccactttgacttgtccacctcttctctgcctcactttcccccttccctctccccatcatctgcactctacctcctctgccactctgagcctcctccggtggatcacatctttggacagactggttctggctgggacacttgtccctctttctttgcttaatgaaccgccactcatcctccagacctgtattagtctgttctcacgctgctaataaagacatacctgagactgggtaatttataaaggaatgaggtttaattgactcacaattccacatgactgggaggcctcacgatcatggcggaagacgaaggaaaagcaaagggactttttacatggcagtgggcaagagagagcgtgtgcaggggaactcccatttataaaaccatcagatcttgtgagactttttcactgccatgagaacagtatgggaaatacttgcccccatgatttaattacctctcactgggtctctcccacaatacgtgggaactatggaagctacaattcagtgagatttgggtggggtcacagccaaagcatatcaagaccccagtgcaaatgttcttccttaaggaaacctctccgtaaccctcagctctgggttacattgcaacaacctttatgacattgtgagatgtgattccttgtttagcgcccatctcttcttccagatgtgtgctagacattgtatgtccaagagaaagatcatgggaaccatgtatgtaatttaaaatttcctagtggttacatttaaaaacattaaaaaatcagccaacattaattttttattgtaggaaaacacaccaaagtttaccattttaacaatttttaagtgtacagtttagtggcattaaacatgttcacaaggttgtataatcatcaccaccatccatcttcagagctttttcataatcccaaacagaaactccatggccattaagtaatctcagcccctggtaacccctattcttccttctgtctttataaatttgcatcatctagataccttatgtaagtggaaatatacactatttgtccttttgtgtctggcatatttcatttagcatatggttttcaaggttaatccatgttgtaacatgtatcagaacttccttactttttaaggttgaataataatctgctatatggatatatcacattttgtttatttattcatccatcagtgggcactgagctgtttccagcttttggctatcgtgaataatgctactctgaacattggtgtataaatatctgtttaagtcccttctttcaattcttttgggtatcgacctaggagtagaattgccaattgctcattgtgtgtttaactttttgaggaatgacattaatttttacaatatattttatttaacccaatatttccaaaatatgatcatttcaacttgtaatccatgtaaaaattattaatgagctgtattacttttttcatgatatgttttcgtaacctgctgggtagggtgtgaattctgtgtggatggagagactgtgcatcttcagatcaaagtacctggtgtataagtaggtgtctgatcaaaagatgcatgcacacattctgcctggggaagggaagagaattactactaatgatagcaacgatagtgtgtttgtctgttttcacaccactataaagaaatactcaagactgggtaatttataaaggaaagagtttaattgacttatagttctgcatggctggggaggcctcaggaaacttacaatcatggcagaaggcaaaggagaagcaagtaccttcacaaggcggcaggaaagagagaggacaggagaaactgctaaacacttttaaagcatcagatctcatgagaactcactcactatcatgagaacagcacaggggaagccgactccatgatccaatcacctcccaccaggtccctcccttgacacgtggggattacaattcgagatgagagttgagtggggacatagagccacaccatatcaaatagtaacaaagatagcaggcccactgcttgcttggtttttcatgttcaccctaagaagagggtacttttattattccctttttagatgcatgaactgaagttcagagaggttaagaaatttaccccaagtcacacagctagtaagtagtggagctgggattcaaacccagctcactggccctgctgagttctacatgctgtggcaagaagttatgttggcaggtattaaatctagatgtcttggaaaagccccctggtgcccatgcagttgtctgccttagttaagaggagttaaaaaggttgatagacgtttacacagcacctttctcttagaagtatccacatttctctctgcctctaggtcaagactatgtggataacctgagcaaattgacctcctggcacacctggctctgaaggcttcataagcactgtctttgcagagggaaattgggagggaaaccggggcaggtgctggccccactgaatctgcacagggaggggaaagccaaagggatttggaaaacctgcgccccaagtcagttgttgggagataaaaatagggcaccttgcagcacataaggtcatcgaatgctacttttagctttcttgaatttgccaacacaagaggttataaaactaatataatgcctgtcactcaagggaggcagagcaatagaacaacaaagggttctggaattaggagcgtctcagaggtcatccctctctaatgtggctttcctggtgtggactctcttgtgcaagcatgcgtgggagccagcctgagctggatgggcctcctaagcttctcacctccttctccctccctcagaggcccatgagagagcccattcttcccagctggtggaggcacagctgtttctcagaggatgcagagccagaagaggcaggatcaagataaggacgaccttccaccctttcttctggtcaccaggccttcatttctcaagactatccatctagggtagccctatgcatgaatagaattttgactatagcgagttgtctcccacttaatttcttgcctgaattcaaggtgcatgataccaatactgttatccatcatggcagctttaatttatgactgttcaaggattgtttcggccgggtgcagtagctcactcctgtaatcccagcactatgagaggccgaggcgggcagatcacctgaggtcaggagtttgagaccggcctggccaatgtggtgaaaccccatctctactaaaaatacaaaaattagctgggcatggtggttcacacctgtaatcccagctacttgggaggctaaggcatgagccaggaggtggaggttgcagtcagctgagatggtgcttggacaacagagagagacttcatctcaaaaaaagtaaagaagaattgtttcattccacaaatatttattaaagcaacatataatttgtgcattgagacaaaaaattatatttattttaatatttttttgagacagagtctcactctgacacccaggctgaagtacagtaccacaatcatggcttactgcagccttgatctcgcaggctcaagcaatcctcccacctcagccacccaagtcgctgggactacaggtgcatgccaccatacccagctaatttttcatatttttagtagagatggggtttttgctgtgttgcccaggctggcctcaaactcctgggcgcaagtgatccaccagcctcaacctccaaaatgctgggatgacagcattttgagccactgcacctggccaaaaattaatatttatttattgcaaggcagtgggtgatacagtagtgagaaggtgagtccagggctctgccttcttagagcttatattccagtgggaaagatggatgataaacggataacaacagtcgatcctcattatttgtggattctgtatttgtgaatttgcctacgggctaaaatgtatttgtaacccttaaatcaatacttgcatttgcagagtggtaaaaaactttgagtcgcctgatgtgcacaacccctgaggttgaacagggcagcattctgccctctcatttcagctctcatggtgtaagcagtgtcctttctgtggtcttaaactgaatgctaagtttttcacattttgtttgtactttgtgtgggtgattttgctgtttacaatggccccaaagcatagcgctgaactgctgtctagtgttccttagaataagaaggctgtgtgtgctgtgccttatggagaaaatacctgtgttagatattcttggtttaggtttgagtgacagtgctgtgggctgtgagctcaatgttaatgaatcaactatatatatatatatatagtgtatatatgtatggtgtgtatatatatatatataatatagtgtatatatatatggtgtgtgtgtgtatatatatatatatatataaaatatatatattaaatacagtgtcttgaaacaggaacacacctaaaacagggttatgtgtggatgagtggatgataagatgaccagaggctcgcaggaacctaaccacatatctctcctagtcgcaatggttcagcatttgccaattcagtatttgcagtgactttatggaagagaacacaattgccacaaataacaagaactgattgtataacaaaacagttccactgagtggtaagggtcatgaggaaatgaaacaggaggaggaatgagagagtagctgggatggaggtgggtggggaagcctccccaaggtgaagaattgagatgagatcctcagagctgtgtgtgcccaagccaccgtggaacccgggaatcctgatgttcagggtattgtgcctttgaccctgccctaacatccatattaggttgtttagggctgtagtgagatgacagcgaccatcaaggtttatatccatgactcccaggggcctgtggtctccaatgtcagatccagttacccccagcaatatagatatacttgaaaagggttattgaggatggtatcttgagtatttcttttatccttgatcccccaagtctggccccatgtgagtctgggctgcagtttataattttatgagttgtagtaaataccccaactctaagatagggtttattttattgcaatattgcaatactaggcaatgttttattgctgtattcctgatgtagattttaactgtgattttaaccaggaagggctttgtgttttagtttaaaatgtccaatgaatgatgataatcattctcttcattccagagactggaagcagctgagtcccaggtttaattgcacttgacaattaaaatgctaaatattgtaaaacaattctacacagtggaggggaaggaatatggggttggggctggatggatggatggacctggaactttctagatgggtggatcttttttaaaaatttaattaattaattaatttttatttccatagttttttggggaacaggtggtacttggttacataagttctttagtggtgatttgtgagattttgtgcgctcatcacccgagcagtatacactgaacccaatttgtagtcttttatcccttccccactccccacttttccccgctgggttcccaaagtccattgtattatttttatgcctttgcgtcctcatagcttagctcccacttatgagtgagaacatatgatgttcagttttctattcccgagttacttcacctggaataatagtctccaatcccatccaggtcgctgtgaatgccattcattcattcattcctttttatggctgagtaacattctagatgggtgggtcttgggaaagtttctactcctctctctgtctcagtttccccatcggaaacatggggctgatgattcctatcccctgggtactcgtttcctattcagatgtgcagtatgtttatagcagccaagagaacgtgctctgtggtcagactgccaggttttgaatttcactttgaatcttggccttgggccagtgactccacttttccagagctgtaatttcctctcaatctcacaagattgttatgagaattaaatgaaataaggtgtgagaatgagaggagatgctgcaaaagcccagcccacagtaagtgctcgataaatgttagctatggccattactaagaatgttttattaaacacccactaggatggctatgatgacaatgatgataaacaacaaaaactaacaagtgttggtgaggatgtggggaagtcagaacctttatatgttgctgggtgggaatgtaaaatgatgcaggcactgtggaaaacagcagggtggtttctcagaaggttaaccacagagttaccatctgacccagcaactccacccctagatatatgccccaaagaactgaaaacagatgttcaaacaaatactcgtacacaaatgttcatagcagcactatgcacacttgccaaaagtagaaacaacttaaatgtccatcagctgaggaatgcttaaacaaaatgtggtgtatacatattattcagccataacaagaaaggaaagaccaacacatgctacacttggatgaaccttgacaacattatgcaaaaggaaagaagccagacacgaaagaccacatagcgtaggattccattcatataaaatagctggaataggcaaatccacagagacagaaaatagtttagggcttgccaggggctgggggaagaagggaattgggaaggattgcgaatggggacagggttttcttttgggtgtaatgatagtgttttggaactagatagaggtggcggttacacaacattgagaatgtactaagtggtgccgaattctgtactttgaaatggttaatgtgaatttcacctcaatacattttttcttaaaaagagctttgttaaaacaaaaaagctaccctaaagttagtgactgaaggttaatcttcccagtctcttggtgggtaataaaatcatgaatctcatagagcaggacgtgggaggcattacggggtcagagcctgtgctccctgccctgtcccatctcccaggtgacctgcccagactagggtcagtgcatttgtttggttctacctggggacatcctggggcggggctagtgcccaacgagacccagggttctgctgaatgccaagctcattaatgaggtcttagattaagattcttgctaatgttgaattactttggcaactgtatgtttttcatttgtccttattcgcttctttttgcaaggatgacaaactcgaaactcaaaaaattttcctggattttcggtttcaggctttctgggattgtggctaaaatgaatgtcctatttgactttcgggaggtcagaaggagctgccccaggtgctgacccacaagcctgtgtataatggctcagctttccaagggctttctggacgggtctctcatttcctgaggggttagggggctccagagaaccctccaatggtacagatctggatcagaaaccctgatctaccacttactagctgtgtaacctagggcaactcagtctttcaaataattatctgttcctagcactgtgaagtggagacaatagcggaattttcttcatggggtcttgtgaggatactatgaggtgatacacgtgaatacttagaatagtatctggcacatggtaggggcacagcaaacagtaattgtcatttgtactactagtacttattgtacttcgcttttcctgtgattccagtcaaatattttcaaccagtgtctaaaagttttgtctcttgccagaaagttatgaggatttaaaccaaaaaacagtttttttcttctaccaatgacttcagcctaatattttcagccagcatctaaaagttctgcttcttgctagagagttttgaggattaaactaacaagtgcattgaagtattcacaaaagttacaagcagtgttgatcctggaatggtagactctctgtcacttctgcctctgaagagctaaagaatctactgtgtagattccaatgctggctccgaaattcagagaaatttaagccacgtgattgcctgtttataacattttaatgggaagggacaaagaagttagacacttgcttagactttctgaaatcactttttcccttgagaatggcttttatttctcttagtcccttatcagagaatgtcaagtgaaaaacccctacaccttgaaatgtctttaatcaatcttcagacctttcagttcttaaaaacctattcccttctccccacccatttcaagacttgaaataaaatgatttgccagaaacagatgacaagatagcaagggtgacaattaataacccccagagccccctgctaccacacctttcctatttaaaatgataaattacctatttccctcagactttattaaaaagaggatcaaaagagagagggaagagttgatacaatacagctcatcagtgaaacgctgctgaagcttcggcagagagaagttgaatccctgtcaatttagaagccggtaatttggataatgaaatgagactttttgcatttttagccccaaacttctagttttgaagtgtaggggtggagaggaagataatttcatgggaaagataatttggcagagggtaagacttttcttcctctctgcttctctctcagactttgaacaaacttcaaggaaagaaagtaaacttgagggcgagtcgatgttcccgtggccccggtggaatggtgtgttgtgtcagtgtgtgcttgtgcgtctttggtggaatggtatgtgtgtgtgtgcgtctttggtggaatggtgtgtatgtgtgagtgtgtgtttgtgcatctttgggggaatggtgtgtatgtgtgagtgtgtgtgcatctttgggagaatggtgtgtatgtgtgtgtgtgcgtctttgggagaatggtgtgtatgtgtgtgtgtgcgtctttgggggaatggtgtgtgtgtatgagtgtgtgtttgtgcgtctttggtggaatggtgtgtatgtatgagtgtgtgtgcgtctttgggggaatgatgtgtatgtgtgagtgtgtgtgcgtctttgggggaatggtgtgtatgtgtgagtgtgtgtgcatctttgggggaatggtgtgtgtgtatgagtgtgtgtttgtgcgtctttggtggaatggtgtgtatgtgtgagtgtgtgtgcgtctttgggggaatggtgtgtatgtgtgagtgtgtgtttgtgcgtctttgggggaatggtgtgtatgtgtgagtgtgtgtgcgtctttgggggaatggtgtgtatgtgtgagtgtgtgtttgtgcgtctgggggaatggtgtgtgtgtatgtgtgagtgtgtgtgcgtctttgatggaatggtgtgtatgtgtgtgtgcatctttgggggaatggtatgtatgtgtgactgtgtgtttgtgcgtctttgggggagtggtatgtgtgagtgtgtgtttgtgtgtctttgggggaactgtaggctacggggaggggtgggtcccagctcagctgcaggatgccatgtgattaaggggaaagtgagggtgtaggttactaccaactataagactttagccatgacctgtcacttatccattacttgttgataacattacagtttcttcatcagtaggatggggataacagcagaactttacccttgaattattctgaagattaaatgaaacgatgcaattagagcatttagccccatcccaagcacagtaagcacacagccaatgttgtgaaccctgaaaatctgagacagacctcattaatttagaaagtttattttgccgaggctgaagatgcacgcccatgacacagcctcaggaggtcctgatgacatgtgtccaaggtggtcagagcacagtctgcttttatacattttagggagacatgaaacatcaatcagattatgtaagatgtacattggttccattcagaaaggcgggacaactcaagcagggagggggcttccaggtcacaggtaggcgagagacaaacgattgcattcttttgagtttctgattagcctttccaagggaggcaattagatatgcatttatctcagtgaacagagagatgactttgagtagaatgggaggcaggtttgtcctaagcagttcccagcttgacttttccctttagcttagtgactttgggtcttccaagatttattttcctttcacaatgttgtataaatgttcatgtataaagggagtaaaagcatctatttcacaggatgccacggaggattgaatacatgcataaagtgctttatagcattacttgttgataactgtcttttttttttttttttttttgagacggagtctcgctctgtcgcccaggctggagtgcagtggtgcgatcttggcccactgcaagctccgcctcccgggttcacaccattctcctgcctcagcctcccgagtagctgggactataggcgcccgccaccatgcatggctaatttcttttttttttttgtatttttggtagagacagggtttcaccgtgttagccaggatggtctcgatctcctgacctcgtgatctgcctgcctcggcctctcaaatgctgggattacaggcgtgagtcaccgcgcccgaccgataactgtcaataacatctactttacagggcaggtgagatcagcaccagtttcctaacacagaatctggtggctgcactccacaggcaggcttttatgtggcagtcccccagtcagtgtccagcaaatgaatgagttatctagggcttttgtaaaaaaaatctaccgcaaactagatggcttaaaccagcagaaacatactttcccacagttctaggggcttgaaagtctgaaatcgggtgttggcagggccacagtgcctccaaaggctctgggagagaatcggttccttgcctgtcccacggcttcagcgggtggctggccatccttggtgctccttggtttgcagctgcatcactccagcccctgcctctgtcttcacatgacgttctcctctgtgtcttctcctcgtcttataaggacacaaaccattggacttaggatgcatcctgatccagtattaactcatcttaacttgattgtatctgcaaagatcctatatgcaaataaggtactggaggctgcagttcaacccaaaataaaggcttctgataaccctgagctttctttctgtcagagttagcacctgccaagaccaggaataaggactggatgattctttttttttttttgagatggagtttcactcttgtcatccaggctggagtgcaatgacacaatcttagctcactgcaacctcaccttcccaggttaaagtgattctcctgcctcagcctcctgagtagctgggattacaggcatgtgccaccatacctggctaatttttgtatttttagtagagatggagtttcaccatgttggccagtctggtcttgaactcctgacctcaggtgatccacccgcctcggcctcccaaagtgctaggattacaggtgtgagccaccgcacctggcaggactggatgattcttgagtgtgagctctgtgtcaggctcaaaatgaaaagcactgtatgcatttatttaatcctcagtggcgttctgtgaaacagatggttttacactctttgtacatgaacatttatacaacattgactgtgtgctagggaatgaagctaaatgctctgtttgcatggttttatttaatcttcagagcaatcatgggggaaagctctgctgttgtccccattctacagatgaagaaacggagtcacagtgaggaattttagggacaaattcatgtctaagtgttggcgttgacttaggagaattaactcttgttctttcagttcagaaagcaagtcttccatatgcagaggtatcttcctttctgggggagttagtcagtgagtgacaggctcatgatcccccctcttccagacctgcattaccagcatgtaattcagggtcatgggatgtttactctggagattcagagatcagatgggagaggaacagtaggtgaacgtgatgaaataatcatgtctttgtagaaaaaaaaaacccactaagatgagattttagaattttgtgctcaatcttttcaggctagaaaaataacttcttcctggggagtgatcccggggtttctgggagaaggggaagttaaggttcagctgcattccagaatctgctcttgggtgtcctgcaggaaattcagactcagcctgtctgaccctgagcttgccacctcatctgtgcccaatttccttctgcatttcctattgctgtgatcagtgccaccggccactgtgtgacccaggctagcaactgggacatcagcctggacttaatgtcctggttatgggtcaggtgaagacccaaaccccacatgtccttcttggacaaggctctgtggcctcgagcaagccacttgacctctctgtgcctcagtttcctcatctgtaagacagagtaaattccacccactttgttggattgttccgtgggtctataactttttatgtgtaaattcaataaatgttggctatttttccttttttctcttctaatatacagtcactccacctctctctatctccactgccataactatcccaggtccccgtcatctcccatccagatgcttccaggagcctcaggctgggctcctgctgctgccgggccctgtccaatcctttctccacaccatggtcagagacatgtttccatgatgctcagcttccctacacacaggagccctgttgagccgcaaggacggatgcccacacagcctgtgcaccagggtttctgggacagctttaatcacacatggacaggagtggcaggtatatagtccccacactcaccattgtcctttgcaccctggtctggcacactgggctccagaaggactccatggatcccatccattgggctgtgtggcttttaagccatatgatcaaagaagcaccagcccctcccctggtatgatcaggagctggcattcagcagcaatgttgtgggcagatgcttggcctccagctccagtccacttgtctgcatttgtccatggggagagccagcccttcctcggcatgagcaggagtttggggtccaagcctcaaggatacagcaatatcggcccctacagaaagttagcttccttcccattatcatttatgattaggggagtttcagctcctctcctggcatgaccacgggactagggtctaaaccttgaagcagctgtgtggtgtggtggaccagagcttccaccacactcctcaccaagtttgattgccacaagccctcagctgcagcaggtctccaggagctctggaggagaccacctccctctctgggaggccagtggcaaggggatcagtcacaccggcccttagttctcagcgtccccttccgcttagaagagcaaaaccctgggaagtcctcccttcacttcttctccagcctggctcgaattttttttttttttttttttttgagacggagtcttgctctgtctcccaggctggagtgcaatggtgcgatctcggctcactgcaagctccgcctcccgggttcacgccgttctcctgcctcagcctcccgagtagctgggactacacgcgtgggtcaccacagctggctaattttagtatttttagtagagacagggattcgccatgttgaacttctggcctgaagtgatctgcccaccttggccttccgaagtgctgggattacattgtgaaccactgtgcccagcctctttaactagacttcacaatcatcttccccagagcctcatttcctttttgtgtacctgtttgtctcttttttttccttttgagacaggagtctcgctctgtcgcccaggctggagtgcagtggagcgatctcggctcactgcaacctccgcctcccgggttcacgccattctcctgcctcagcctccagctcatcctcccgagtagctgggactacacgcgcccgccaccacgcccggctatttttttttttttttttttggatttttagtagagacggggtttcactgtgttagccaggatggtctcgatctcctgacctcgtgatccgcccatctcggcctcccaaagtactgggattacaggcgtgagccaccgcgcctggcctaattttttcctctctcaaaataactctagcttggctgggcgcagtggctcatgcctgtaattccagcactttgggaggttgaggctggtggatcacgaggccactgtagtcccaactactcgagaggctgaggcaggagaatcgcttgaactccaggaggtggaggttgcagtgagccgagattgtgccactgcactccaacttgggcgacagagcaagactctgtctcaccaccccgcccccgccccatcccgaaaaatagctctagccatactgaacgactggcagttctccaaactcccacgtccctcatctcctggcctttgaccctgctgttctctctcttaccatccttctgctgtcacccacctcactgccacctttcctgggaactcttgttcaccttcaagttctgggcttaggtgccacctcctccaggctgccttctcctacccacccccacctcctggccagtggggttccactcttctgtgccctgtatgctcctgcactttttctagcttaggattctgtgtttggtattgtgagtacttactgattcattttatgtagggaaaattcacataacataaaattaatcatttcgaagtaaaccaggatgtgacatttagttcattcacaagattgtgcaaccaccacctctatttagttccaaacctatttcatcaccccctcaaaaacccattcctattaacagtcactccccattccctgccagccccagctcctggcaaccacgaatctgctctctttctctatagatttgcctctttgggatttttcatataaatggaatcatatgatatatgaccctttgtgtctgacttcttttacttagcatagtgtttttcaaggtggatccacatgaatcagtacttcttccctttttatgggtgaataatattccattatatggacgtaccacattttgtttatccattccttagttgatggacacttgggttgtttccaccttttggcaattgtgaatagtgctgctatgagtatttgtctacaagtatttcagtccttgctttcaattatttggggtctgtacctaggatggaactgcagtgagagttttttgattattgatcattttcactagactgggatcatcttgagggcaggggctggcatagtgaatgcctgggcacaaaggggatgagtcacaaggcacccagaatagatgttttcacccatcttcaatcatctgccatttgttggcattgacataatggctcaggctctgtctgatggtttgattgctttatcttattaattcagtcctcacttcactctgatatctgctcaaatgcccactgtcacctcctcatccttttgcgattaaaatagcccccaacacttgttttgtctctgtgccctgctttctttccctctagaagacttactatcactacatatatgataaatttgttcatctacttgtttcatttgtttccctactaagaatgtgagctctgcaaaaataggttttttttgagtgtgtgtgttttatttcttgttctattctggtgtccacaacagtgcctggtacgtaaagggtgttcaaatatttgtaaaataaatacatttaattctcactgcaccctccaacaaagccataattattcccattttatgagcccccaaactgaagctcagggaggttaagtaatttgcccaaggtcacagagctggtcagtggtttaaccagaattctattgggttcttctggttcccaatcccatattctttccatttcattcaggatggacaacagcttgtcatgataatgccaaaagcactactttgtggcttcatggtgcagtatttgattaagacagcttagaaaatagattgactttcttaaacaggctttacttaggctaacttgacaacgagcttgtattccctcagcaaatacatcaatccagagcttaccatgcgatggagaaacttgtcttaacttgattctctgttctgttctggctcttagacctatttagcttcagctaaatgtcacttcctcactgtacaaagggtgagaatagtaaagctgtcagaaccactacacactctttaaatagcagatattgatgtattaccacagtgttgagaattacaatgccagtagctagcatttatggtgtacctattgtgtgctgggagctgtgctaagcacattgcttgtatttgtgcatctgatcctcatagtagtccctgagttttattaggttttattattgtttattagtccctgagttttattaggttttcttattgtcccattgcacaggtgacaaagctaagacttagagaggttagatgagtgcccaaggtcacacagccataagtggtggggagtcagatttggagcccaagtcatccgactccagcgttgactctcttactcactgggctaatgtgtatgtgtcaatatttgagagtagatactgtaatgatggtgactttggtagagtgttcttctggcaagcctgggaggaggctcattttgagaaatgagcctttgtttcagtatcttttcccgtttgaatgatctatgatggcaaatggaggccccagttctctttcacagacagcctcatgccctgcttgttgaggtggccgaagttttgggtttgaatctggctgccagttaccatctctcttgtgaccttaagcagatcttcatctctttgcatcagtttccttacctacaaaatggaaatcaaaatgaccctttgcacacagagttacaaaaattaagttagatgtaaacagtcccaatataacaagtgaagaaaacagacaatgaaccattaaatatggtcttatggaatttttttttccttaaaaaaaaaaaatccgccccaaaccatctggaaggctcgaccatcagctattgatagggatgatggctaggctgtagaacagcattgcctttttttcttatctcaattttctaatttttctgtactgaatatataataacaaaatgagttgttttaattaaaaatgggacagtgagtcagtgttcatgaaagcactttggaaaccatcaaatgtgctataaattagctcttgttacagtcgttatagtaattattattgttattgctagtcagctaggaatttctttgcgccccaaatctccttccttggcccatcatggaagtggccacgtggttaccttcctctgggttctggtgggtcttccttcattgacacctggccgacttctctccatctttgctgccaccacccaaaccagagccagcatcatctcttgcaactccctgagataccccttaattgggctctagttttccccgcagcagcctgagtgatctttgagaaatgaacattcaatccatgcctcccctgcctcaaaactcccaatggcttcctgttggacttggtataaaagccaatctgcaccttagcccacagacctggcagtctgttttcacctgtcccttcagcctctccttgagtgtcaccccattgtcatcacacagttgtgaacaccaccttcatgcaggcacccgggaaagagacctaggaaagtgactgccctaacttagatggttttgaagcctgcacatttggtgttgttggatctttatgcatttagagctcttagcatggaggatgcagaaaggctttacgtggttgcatgagaatctgtgtctttagaccaaatttgtatttgcactgtcaatatggcaaatgaatgaaaaatgttaatacaccattagatttttagattttttttttttaatagcaaagacttggaaccaacccaaatgtccaacaatgatagactggattaagaaaatgtggcacatatacaccatggaatactatgcagccataaaaaatgatgagttcatgtcctttgtagggacatggatgaaattggaaatcatcattctcagtaaactatcgcaaggacaaaaaaccaaacactgcatgttctcactcataggtgggaattgaacaatgagaacacatggacacaggaaggggaacatcacactctggggactgttgtggggtcgggggagaggggagggatagcattaggagatatacctaatgttaaatgacgagttaatgagtgcagcacaccaacatggcacatgtatgcatatgtaactaacctgcacattgtgcacatgtaccctaaaacttaaagtataataataataaaataaaaaaaaggtttttttttttttgagactgagtttcactcttgttgcccaggctggagtgcaatggtgcgatctcagctcactgcaacctctgcctcctgggttcaagcgattcttattgcctcagccttctgagtagctgggattacaggcacacgccaccacacctagctaatttttttgtatttttagtagagatggagtttcaccatgttggccaggctggtctcaaactcgtgacctcaagtaatctgcccatctcggcctcccaattgctggaactacaggtgtgagcctccgtgcccagctgcccatattctttttatcacgtcattctgtttatttccctcccagcaccaataaccatgtgaaatccttctgtgagcatgttttcttgtctatcatggctgctttggcagaatgtaagtccaggggaccagggtctcatctgtgttgcttttgtgtcttttccaagcaaagggcatagttggcactcacaggatgtttactggacaaatgcatgaataagaacatggcgacacagatctggaggaagtatgcggtggctgaggaagtggtcagggaaggactaaggatgaacttgacttccttggaatttgtgtatctcacatgagggttaggtattaaaatttccatgtaagggaaaagttatcctttaaagtcctttaaatcactttgaaactaccagaactgggaccttgggaagttcaaaaagtgagaattaacttctttgcttttctgagcatttgggctgtggggtcttcccagctatggggcagtggaaggcaaggctgttgaatggagaatagggtaacagggtcaacaaggggattttattgtctttttggaggagccaagtagagatggttggctttatgtaaatgtacttatgatgtaatgtgggtatgatgtaacatgcatttgatagaatgtctgtaagaggtaatgggcatatgaaatagcatgcatatgatgtaatgcacatataatgtgacatgcatatggtgtaatgtgcatatgatatgtgcatataacatgcatacaacataacagatatatagtgtaacatgcatatgatatgatgtgcatatgatataacatgcatacgatgtaacaggtatatagtgtaacatgcatatgatgtaatgggcacatggtataatgtgcataagatataatttgcatatgagataacatgcatacgatgtaacaggtatatagtgtaacatgcacatgatgtaatgggcacgtggtgtaatgtgtgtatgatgtaatggtgtgtatggtgtaactcacctggctttctcatggcttacccattgtctctgctcttctgttccaactcaggaggcaacctttccaaacaagactggaccatccagtggcccaccacagagacggggaaggagaacaatcccgtgtgccccccggagcccaccccgtggatccgcacccatctctcccagagccccagggtcccgtccaagtgcgtccagcactattgtcacaccagccccactcccggggcccctgtgtacacccacgtggacaggcttaccgtggacgcctacccgggcttgtgcccgcccccgccactggagtcgggccaccgttccctgcccccatcgccccggcagcggcacgcggtccgcaccccgccgcgcacccccaacatcgtcaccaccgtgaccccgccgggcacgccgcccatgaggaagaagaacaagctgaagcccccggggaccccaccgccctcctcccgaaaactgatacacttgatcccgggattcaccgcgctgcatcggagcaaatcccacgagttccagctggggcaccgcgtggacgaggcccacacgcccaagtgagtgcgatcggtgggtgccctggggcggtcgaaacccggcctgcgaggggctgccccttggtcccaggaactgcccaggtcaaggaaaccgggaacagacttgcgttccagactctggttgaatgaaaaatggcttttcacagagggttctgagcaaatgaatagaacagaatttcccagaattggccgtttaaaaaatacgattaatatcctatggcctaggggctaaatctgatacccggcctgattttgtaaataaaaggtattggaacacgcccatgatcattcctttatgtgttgcctatggctgcttttgtgtgacaatggcagagtgagaatagcccacaaagctgaaagtatttaccatctggctttttactgaaaacgtttgccaacccctgcagagtctagcctagtgccgctcctagaaataggatatgaggcatatattaaccttcaactttctagtagtcacattaaaaagaatgaaaaggaacaagtgatattaatgatcataatacatcattcaacccaatatatcaaaattataatatcttaacaaagaatcaatgtaaaatatcattacagagatattttgcattttttaaaatacaaagtctttgaaattgaatgtgtattttatatccacggctcatctcagttgaaggtggtaggaagcaggacacgttggggaaattgacagaggacccctttgggggagagagcaggtgtgtgatgtagggtgagactcgaggattaggcaggttgctgtgctattcacagtagccaaaaagtagaaacaacctgtgtccatcagtagacaaatgagtaaacacagtgtggtctatctatacaatgcaatattattcaggcttaaaaaggaagaaacttctttttttttgagacggagtctagctctgttgcccaggctggagcagtggtgggatgtcagctcactgcaacctctgcctcccaggttcaagtgattctcctgcctcagcctcccaagtagctgggactacaggcctgcgccaccacgcctggctaattttttgtagtttttgtagagatagggtttcaccatgttgaccagactggtcttgaacttctgacctcaaatgatctgcccgccttggcctcccaaagtgctgggattacaggcatgagccatcatgcccgacctgggaggaacttctgatatatgctacaacatgagtgaaccttgaagacagcatgctaagagtaaaatatgccagacacataatgacaaatactgtataattccaccaatatgagatacctagagtagacaatttatagaggcagaaagtagaacggtggatgccagggctgaggggagggagaatggggagttgttatttattggatatagactttgcatttgggatgatgaaaacattctggagatggatggtggtgatggttgtacaacaatgcaaatgtaattagtaccattgaactgtacacttcaaaatggttaagatggtaaattttatattatgtatattttatcaccattttaaaaaggcaggattctgtaagtgaagggttggcacactttttctgtacaggggcagatagtaaatactttaggctttgcagaccattcagtctctgttgcagttactcaactctatcatgtagcacaaaaccagcacagacaataggtaaacaaatgggcatggcagtgttccaataaaactttatttataaaaacaggtacctggcccaatttggcccatgaactgtgatttaccaagccctgtctgaagccgtagtgtagagagtgatctcttttctgaagcattgggaatgccctacagtgattgacgtggaacatgtgattttacaacagtcatatttaagctgctatgtgaaacctagcttgaagacgtagaatgcatgtttgagacctctgagggtgaagcagaggatagatgcttttctgattggagttgtgtttgatttgcatggttttgtgagagccacagagattggggcctgctgaaacctcaaggtgaagatgtggggtaaagttccaggaaggctgggagtgcaggttgctaaggtggagggtggaagaggcatttggggtttggttgctacggtggccccacactttgtgcttctccctgtccctttcccagggtgcaccacttagtaaggcgaaacttgatcagaaagccgactctccagacacatcatcttctaatctgcaagatggaggccaagtgagagaggctgccctttggtttttaaatgctgtcctttccctagacccctgaaggatttattctgcctggatagggttgaatggcccacttcttcaaggccttccaaattgacttggccacctttagtgttttttggaatttgtgtatcaggactcaggtggcgttaagctttgcccttcaggtttcttctggctgagttagcaagctcatcacttcctcaaggctggtagttccctggcccaccttgggggatgctgtggttcatggcaaggaagcagtagaggagaggaacagagtggtcagtttggtgatgtggaaaatgccgtgggaccacttagcctgggaccatgcctccaggttcacagggatatcagggcagcaggcctgggggtgttaaaaaaactaaaacataaataacagcaacctgaataatgttggcagcgggggtcatgggtagaggtgaattctgatcaggatttataaaggaggcgttagttgaggtgagtcccaattattagactgataacaacagtcatcatttacctgggtctaaactagtcctgatcctgccaggaagtagccttttgaccttggatttaacctctctgaatcttagctttctcagctgtggacccaagaggttagaatacatttgtgtttttaaatttgtggtcatgacccatttgtggttgatagcattattttaatggcttgtgaccagcattaaaaaaatgaaatagactagcctagactagagtatattggaacacattgcatctggtaagcgttttagtgttgttttgtaaaacttgttttcagtaagtacaggcatacttcagagatattgtgagtttggttccagaccaccacgataaagatcccaaagtgaatgacacgaattttgggtttcccagtacatagaatagttatgttttataccatactgtagtctattaagtgtatgatggcattatgtcttaaaaaacaatgtacatacattaatttagaaatactttaatactaaaaaacactaatgatcatctgagccttcagtgagccatactctttgctggtggaaggtcttgcttcaatgttgatggctgccgactgatcaaggtgatggtagctgaaagttgggctgattgtgacaatttcttaaaatacaacaatgcagttttctacatagatagactcttcctttcacaaaaaattctctgtagcatgtgatgccgtttgatagcctagtagaacttctttcaaaattagagtcgatcctctcaaaccctgccactgctttgtcaactaagtttatgcaatattctaaaatgtttcttgtcatttcaacaatgttcaaggcatctttacctggagtggattccatctcaagaaaccactttccttgctcatccgtaagaagcaactccttgtctatttaagttttatcatgagattgcaacaattcagttatatcttcaggctccacttttaattctagttctcttgctgtttccaccgcatctgcagttacttcctccattgaaatcttgaatgcctcaaagtcatccatgagggttggaatcaacttcttccaaactcctgttaatgttgatattttgacctccttccatggatcacgaatgttcttaatggcatccaaaatggtgaatcctttccagaagattctttttttttttttttgagatggagtctcactctgtcacccaggctagagtgcaatggagcaatctcggctcactgcaacctccacctcctgggttctagcaattctcctgcctcagcctcctgagtagctgggattacaggtgcccaccatcatgcctggctaatttttgtatttttaggagagatggagtttcatcatgttggccaaactggtcttaaattcctgacctcaggtgatccacccacctcagcctcccaaagtgttgggattacaggcgtgagccactgcacccggcctccagcaggtttttattttacttttcccagatccatcagaggaatcactatctatggcagctatagccttataaaatgtatttcttaaataataagacttgaaagataaaattactccttaatccatgggctgcagaatggatgtattagcagggatgaaaatcacataatctgtttgtacatcttcatcagaggttttggttgagcacatgcattgtcgatgagcaataatattttgaaaggaatcttgttttttctaaacagtcggtctcaacagtgggcttaaaatattcagcaaaccatgctgtgaacaaaagtgctatcatccaggctttgctgttccatttataaagtacgggcagagtagatttagcgtaattcgtaagagccctagaatttttggcatgataaatgagcattggcttcagcttaaaagtcaccagctgcggtagtccctaacaagagagtcagcctgttctttgaagctttgaagccaggcactgacttcgtctctctagctctgagagtcctagatggcatcgttgaatataagactgtttcatttacattgaaaatctgtcatttagtgtaaccactttcatcagtgatcatagctagatctaggtaacttgctgcagcttctccatcagcacttcctgcttcactgtacttttatgttatggagacaacttctttccacaaaccttataagccaacctctactggtgtccacattttcttctgcagcttcctcacctctctcagccttcatagaattgaagagagttagggccctgctctggattaggctttgacttaagggaatgttgtgtctggcttgatcttccatccagaccactaaaactttctccatatcagcaataaggctgttttattttcctatcattcatgtgctcacgggaatagcacttttagtttccttaagaaaaagaacttttcctttgccttcacaacttgaccatttggcataagaagcctagctttcagttcattttggcttttgacgtatcttcctcactaagcgtaatcatttttagcatatgatttaaagtgatagatgtacaattcttcctttcactggaacgcttagaggctattgttgggttattaatcaggctaatttcaatattgttgtgtttcagaaaatagggaggcccaggaaaaggagagacagatggggaatagcctgttagtggagcagtcagaacacatacaacattgatcgatttatttcactgtcatatgggcacggtttgtggcaccccaaaacaattaccatagtgacatgaaagatcactgatcacagataaccataacagatataataataatgaaaaagttagaaatattgctagaatgaccaaaatgtgacacagaggcatgaagtgagcttgtgctgttggaaacgtggcagcgagaggcttgctcaatgcacggttgccacaaaccttcaatttgtaaaaaaatgtgatgtctgcaaagtgcagtggagtgaagtgcaatacaacaagatatgcctgtgtgtccttttctttttaccccgctggaggctcttcctactctgaacagctttgattctagaataaaccccatcagggagtaggtgagaaggtttgagaagcctttgccctctcttctgtgaaatgtagccagagatagttccagagctatttggtgcattctggttccagttatctctctttcatgtctggtttcttctctccttcacccctgtagtcctgctgggaaccatctctgtggctaactagtgttcagtctgcttttatttcctctgaatggaatgaatctgagtttcaacagtcacagatctttgtgaacaggttccaaagctttcaaaactgttggttgctgtgatttttcaagcacacaataccaaaggaggtcttgggttggaggaaggctaggaaggctatttttatttttattttttgagatggagtcttgctctgttgcctaggctggagtgcaatggcgcaatctcagctcactgcaacctctgcctcccaagttcaagtgattctcctgcctcagcctcccaagtagctgggattacaggcacctgccaccaccccaagctaattttttttttttttgagatggagcctcactctgttgtccaggctggagtgcagtggcacaatctcagcccactgcaacctctgcctcctgggtacaagcgattctcctgcctcagcctcctgagcagctgggattacaggtgcatgccatgccgcctggctaatttttgtatttttagtagagacgggatttcaccatgttgatcaggctggtcttgaactcccgacctcaggtgatcttcccgcctcagcctcccaaagtgctgggattacagatgtgagccaccatgcctggccgaggaaggctattttttaggccccttatccttggtgctctcaggcacacccgtggtggtttttatcagatgatctgtttgggttttccttctgtccccagtagtatctcacgtgccttttcagaatgagcatgacaagaaaacaagaatatactggccatagcatgtctgtcatctccactgggagatttgctgtctaggtgtgttggaatatgttagaactgctgtgattagtctaatcaaagctgtttcccctgttttgtgttcattctcaaagaactgtttattttcttcttttcctttctttttatttttgcatttaagtatatggttttattcctctggcattcctaaaacacacacacacacacacacacacacacacacacacacacacacacacacacacgctctatactttccccagtaaaagtaatgattgattattgtggaagttgaaacaactttggaaatgtgatgaagacagtgggaaatatgtgctgatgttcttgttttccttcttctttttttttttttttaactttcattttaaggtcacgggtacaagtgcaggtttgttacataggtaaacttgtgtcatgggagtttgttgtacagattatttcatcacccaggtgcctagtagccataagttatttttcctgatcctctccctcctcccaccgtctaccctccggaaggccccagtgtgtgttgttcccctctatgtgtccatgtgttctcatcatttaggtcccacttaaaagtgagaacatgcggtatttggttttctgttcctgtgttagtttgccaaggataatggcttccagctccatccctgttcctgcaaaggacatgatcttgttctattttatggctgtgtagtattccatagtgtatatataccacatatacttatatacatagatatacatagagcatgaattctcaatggggctgaaatcacctctgaggggacaaagattggttattggggaaagacaggaaaaatcttggatttttacaatagtttatgcctctccttcacaaggagccaccgtatgtaaacagagatacaccatatctgcgcttatgaaaatttcactggaggttagggatggagattaggaaccacaaaatctaaaaacgttcccaaaggagccataatagaaaacgggttgagaaacactgacatagattatggatttaatcctataaatgcagttagccataggcatggagagttatcaagaatccctctgacattcttatcagcctttgttttccctctggctttgtggccatacttagaaaggtaaacaggcactgattccttatagtgagctgttcagaaaattaagagggaatgatctcagggattctggttatcttgatcttcatcccaaggatcccacacccacagccacgttgttgggggaagaaagatcctaacaactctatgtgtgcaatgatttgtatgtcttcagattttctcatttaggtctgcccacaatacaaatggcttgttccttcttttcagaagatctgaaagggtaaactgcatttctgtaaactgaattatattttaaatgtgcaggagaagctcagtattaaaaaggaatcctatcacatatatattttttcaaatccttgttaaaggtgatttttcaattataattgcaattacagaagtaatttgcagatatatctttattttgaaaatacaagcaaaataaaatgtaagcaatagatgataaaattctccatttcccttgtcacagagaactactataactgctattaatactttgatataaatccttgtgtgcatttattcatgtttgtaggcatatatgaaatatatctagttccctttcttcattattggaaccacactatatgcttttattaatgtgacttgcctttattagtcctgcacaaatacaaatattccatttatgaccttttcacaatttacttctttggaaattcttctgttttccccaaagcacatctagaacattccttggtacatgtcgctgtgttcagacgtgtgtagtttgtgagtgaacacatttcacctccacccttatggaacagtatgtcaaaaacttcagctggcctgtgagcagagagaaccaggctggataagagccatgtttattataccttcactcaaaccccattctctctgttccaactaattcatatttcgtgcttggcctaggctatatcatttgttgtttgcatggaaacaggctttgcctaacagattcattatgtaaataagatttcaggaggtatatttttgtctgttttagaaaactaggtataagcacttaaactcactagcacacacctacaaatcattgtgctaattattacaaggatctctaatatatttataagggcaagagaggaatgactagtctgtgggtaatagtatattcattaaaataggaagacttctgccatactcatttggtaattccttttaggctaactaagcattcagacacgctcagcaccatactgacttaagaggatgcaggcagcattgggcatctcttctgtggatcctcaggggccattcttttttgccccctacctccaagtggcagtttggtacaaagtgatgagacccacattaagcaggtgtggcaactatcctgtcttatgggacaatagctgttgtaaaaactctatcttcatggctgccagggtgtctgcaggggacatgccctgttacaacagtcatgctacttaaggactcccaaagctgtagattcctcattagatatttcagatccattccgtgagctcccagtccagatgcagtctaccaacaaggggcaatttgatgagcactgtggcccactagcacagtgatgtttcctctttatcaggtgttcagcagatcagagctagaaagttaacccagggttaaattctcatgcagaagaggaaaagattgtgttaatccttgatatacagtgtattagtccgttctcacgctgctaatgaagacatacccgagactgggtaatttataaaggaaagaggtttaatggactcacagtttagcatggctggggaagcctcaggaaacttacaatcatggcagagggggaagcaaacatccttcttcacatggcggcagcaaggagaagtgcagagcaaaggtggggaaaagccctttataaaaccatctgctctcaagagaactcactcactatcatgaaaacaggatgggggagaccacccccatgattcatttatctgcacctggtccatcccacgacatgtgaggattatgagaactataattcaagatgagatttgagtggggacactgccaaactgtatcacacagcttcacatgtactcttatgttcattgcagcactattcacaataccaaagacatgaaatcaatctaggtccccatccatggtggatcggataaagaaaatgtggtacatatatgccatggaatactatacagccataaaaagaacaaaattatgtcccttgtggcaacatggatgcagctggcggccattatcctaagcaaactaacacaggaacataaaaccaaataccacatgttctcacttataagtgggagctacacattgtgtacacatgcacataaagatagcaacagtagacactggggataactagataggggagagaagggagagggacaaaggctgaaaaccaaacaactgggtaccatgctcattaactgaatgttgggtctatcataccccgaaccttagcatcactcaatatacccatgtgacaaacctgcacgtgtacctcctgaacctaaaatgaaagttgaaattataaaaaattgaaattaaaattaaaaaataaaaatcttataatgtagatttgtcaccaattcatgttgaatgtcttattttgaattgagatcttttgcaaggtattttataatttatattaatagcattatatgtatatattctataacataaaataattatttctagtaaaatgtatgctcctgagaaattttcattaagtattattattactctgcataagaaagttcttctttttttttttttttttttaagacagagtctcactctgtcacccaggctggagtgcagtggtgcgatcttggctcactgcaatctctgcctcccgggttcaagcgattctcctgcctcagtttcctgaatagctgagattacaggtgcatgccaccatgtctggctaatttttttgtatttttagtagagacggggtttcaccatgttggccaggctggtctcgaactcctgacctcaggtggtccacctgcctcagcctcccagagtgctaggattacaggcgtcagccattgcgcccagccagaaagttctatttgatcccccagattcccattcagcattgacctagtacccccatcctggattctaggccctcttccttagctctggagcaagaataggtccttatcctcttaaagaccctgccccagcctccattaagaccatgccacaatcccctagctgctgaatctttcaggcctgtgatgagagattcagtccagtaaggctcatttaaaatatgtttagctttctaaatatcaaatggactatcttttggtgtttgccccagaggcttatacagacagcactaatgaatcatctattgtcacattcttattgaaacagcagctttgaagttccacaatggaaaattagctcaagaatgtgcttcttgatgaatttttgtggtgaagtgttctgtgggttgggtaacagagtatttagtttgcagtcccttattatttacaggaacaaactgatgatattatgacggtgagatttttttcctatggtatatcgagttctttgacttacctagtgcctgccttcctctcgttatttcttttcaaggagttgagagtttcctaggaggtgttttagaaggagcccaaggtgaatcccaccttggctactaattagccttgtgactgcaaataagtcacttaggaattgatgctccagcagtgtggagactgtggctgcccacttctcagagctggtaaggtccccttatactccctagctgtacttaggatgtcacctgcagctgtggcaggcagtttctgtacacaccgagggcttcccatgtcaagcacctgtgtctcggcctgggaggtattgttcgtttgcttttttttttttttgccagtggagcatgttcaatctgagtgcagggccggctggaaatgtcaggggcttggtgttgtccttgggaacaaccttcagttgctgaaggacaagagctagtgcataaatatgccctcagagggcccattctgctgtgcgttctatacccctcctgaaggcttcccagagggacagccccagttgtccccagaggcattccccgtaacaccctttatgggctatgttttctcccctgcctcacctctccatctcctcatcctgctgctaggatcacctctcaaatatactacaaggaccccaaaccttgctttagggtctgcttttgggggaacctaaattaagacagggataaaggtcatcataagtataattgcattaagctcttgcacagctatgtggacacattttcactaacacaaaagttttcttgattgatttgttattagaatatacatgatagctgtcacttatggaaggcttattgtatgctgatactttgcatcatttattggtatttttactatttttattttaattgacaaataataactgtacatatttatggagtacagtgtaatgtttctatatatgtatacattgtggaattatttaagtcaggctaattaacatatctatcatcttacatacttattatttttttgtgatgagagtatttcaaatttactctcagcggttttgaaatatgtggtatattattattaactaaagtcaccatgctgtgcaatagatctgaaaaacttattcctcctatctaactgaaactttgtaccctttaaccaatatctccccattccactgcctccttcctgccagctcctggtaaccaccattctattctctacttttacgagtttgacttttcaaagtgagattatgcagtatttgtctttctgaacctggtttgtttcacttagcatggtatcctccaggttcactcatggtgtcacagataacagggtttcctgttttttaagactaaatagtactccattgtgcatatatataccacattttctttatccattcatccactgatggactcttaggttgattcaatgtctcagctattgtgaataatgctgcaataaatatggtagtgcagatatctctttgacatactgatttcaattgctttggatacatatgtagtagtgggatttctgaatcttatggtagttctatttttagtattttgtggaacctccacactgttttccataatggctgtactaatttacattcccaccaacagtgtacaagggttccttttccccacatcctctctatgacttggtaattttgtctttttgataaaagccattcttgacaggtatgaagtgagatctcattgtggttttaatttgcaattcctcgatgattaatgatgttgagtattttttcataaatcgattggtcatttgcatgttttcttttgagaaatgtctattcaggttctttgcccatttttaattaattaattattttattttattttattttattttaagttccgggatacatgtgcagaatgtgtaggtttgtcacacaggtatacatgtgccatggtggtttgctgcacctatcaacctggcatctaggttttaagccccacatgcattacgtatttgtcctaatgctctccctccccctgtcccccaccccccaacaggccccggtgtgtgttgttccccaccctgtgtccatgtgttctcattgttcaactcccacgtatgagtgagaacatgtggtggtttggttttctgttcctgtgttagtttgctgagaatgatggcttccagcttcatccatgtccctgcaaaggacatgatctcattcttctttatggctgcatagtattccatggtgcatatgtgccacattttctatatccagtctatcattgatgggcatttgggttggttccaggtctttgctattgtgaaaagtgctgcagtaaacatacgtgtgcatgtgtctttatagtagaatgatgtataatcctttgggtatatacccagtaatgagattgctgggtcaaatggtatttctggttctagatccttgaggaatcgccatactgtctttcacaatggttgaactaatttacactcccaccaacagtgtaaaagcattcctatttctccacagcctcaccagcatctattgtttcctgactttttaataatcaccattctgactggcatgagatggtatttcattgtggttttcatttgcatttctctgatgatcagtgacgatgagcttttttttttatatgttttttggctgcataaatgtcttcttttcagaagtgtctgttcatatcctttgcctactttttgatgggggtttttttttcttgtaaatttgtttaagttgcttgtaaattctgcatattagacctttgtcagatgagtagattgcaaaaatgttctcccattctgtagcttgcctgttcactctgatgctagtttcttttgctgtgcagaagctctttagtttaattagactccatttgtcaaatttgacttttattgcaattgcatttgatgtgttagtcatgaagtccttgcccttgcctatgtcctgaatggtattgcctaagttttcttctagggtttttatggttttgggttttacatttaggtctttaatccattttgagttaatttttgtatgcagtgtaaggaaggggtccagtttctgttttctgcatatggctagccagttttcctagtaccatttattaaatagggaatcttttccctattgcttgtttttgtcaggtttgtcgaagatcagatggttatagatgtgtggtattatttctgaggtctctgttccgtttcattggtctatatatctgttttggtaccagtaccatgctgttttggttactgtagccttgtagtatagtttgaagtcaggtagcgtgatgcctccagcttagttctttttgcttaggattgtcttggctataagggctcttttttggttccatatgaaatttaaagtagttttttctaattctgagaagaaagtcaatggtagcttgatgggaatagcattgaatctataaattactttgggcagtaaagtcatgttcatgatattgattcttcctgtccatgaacatggaatgtttttccgtttgcttgtgtcctctcctatttccttgagcagtggtttgtagttctccttgaagaggtccttcacatcccttgtaagttgtattcctaggtattttattctctttatagcagttgtgaatgggagttcattcattatttggctctctgcttgtctattgttggtgtataggaatgcttgtgatttttgcatgttgattttgtatcctgagactttgctgaagttgtttataagcttaaggagttttggggctgagatgatagggttttcaaaatataaaatcatgtcatctgcaaacagagacaattcaacatcctctcttcctatttgaataccctttatttctttctcttgcctgattgctctggccaaaacttccaatactatgttgaataggagtggtgagagaggtctttgcccatttttaaaatgagttattttgtttcttgctattgagttgtttgaattccttatatattttagatattaacctcttatcagatgtatgacttgcaaatattttctcctactccataagtcatttcttcactctcttgattgtttcctttgctgtgcagaagctttttagcttgatgaaatcccatttgtctatttttgcttttgttgcctgtgcttttagagtcatatcatggtttattttatttagtcctgaaagtcccattttgtaggtgagaaaataggctgtaagagagtataccttgtccaagttcatttacactgagaatcagaagagattccattttacccaaagtctgtggcagcattggggtaggggtagggcaggggctctggaaccaggtggcctgagtttgcctcctcttttcacccttcctgactgtgtgaccctgggcatgtcacttaccctctctgagccttggtttcctcatctatataatgaggctcataacagcacttagttcatagttttgttggggggagttaagtgacacagagtaaatgctaaattagtgctgccaatcatcattatttaaaaaatattattcctagttgttattcagaatctgtgaatataaccttggttactggtaggtttcttgcaggggaatgatcagttaatcaataacactgtggaggataggagaaaggatctgatagaacccccaatgcttttaaggagcttcaagtctagtttgagaaaacaagagatatttattgttaagatgtgaagttaataatggatcaagcatgaaaacagatttggaagtagagaaaaacttacagatttattgcatccacccccaggctctaagtgcttccatgcagggcggctgtcagtggctgcagagtgatggattgctttcctttcttccttcccttcctgctagccaacttagaaaacctctctgctagatcttggaccctctataaacaaagttctaggttggaaccatggagaatctcttatcgggctttaattcaggcattcctttcctttcttggggaagaaaaggctcataaaggcttatgtctaccagccaacagtttttaacccagttacagttgtgatgggtcctggtacccagaacacatggacgcatgggaagattatcactttatgttcaaggagacagggaactaacaattttttaatacatagggtgggcctgttactccatgtattttagggtaattgattctcacagtaaacaggagaagtagttattattagccccattttgtggatgaggaaactgaggctcagagaggttgaccagtgccatgcaacttttcaagcagcagaggcaggatgggaacccagcctaccaccagaggtctttccgctatgccatgatggatggggcttatgccaactagacagcacagaaatcaaatgctataggaatcagatggaagagagggcatgcagagcttgtgtgctggcttgggaccagtgacagaagcactaggagtggtgagaatgaagtgaagggagctgagaattcatgaggtactcttggcacctccccagacatcatcttggcttggaatctggaggccaggcattgaaagcagccaggcattgaagaatcttctgcttctctctctctcctctagaagagaaaggacttcaccttgcattgtttaagatgcctggtgattggctaagtgcatctgaggtccttgccacttagagtgcatttgtataccaatgacagaaaagtaggagagtgtaaaagttcagggcataggaaataaagctgaacagatcccagccatgccacccattggccaaatttccttggaaaaatgacttaacttgtctgagcaatagtttccttctctgcaagatagagatcattatagcagttatagtacagagttgttgaagctttactgcactgagtgtatacatgtgggtgtgtgcgcgtggaacatattcacagaaatcattgtgtatattgtgccatagcatagttcatgttctggaaaacctcaagtcaaagaaggagacatttgctgctttctctccacttctctccatttgtcatttggttgtccatacttatggtcttcccatttccctccaggagcacattaagcaaggctgcagtggcggtagaatgggaatcccaagacagatcgtgccattgccatttaaagaaatggagggtgatcaaagtcctggttaatgaagacgaagagcacttgcttctttgggaagagttagtaatgggaagttgggctgaaaacctaaacggtgtaatgaagagttctagttggcaggcttatttttgtgtttagttgtttaagatggatggtgattggcgaattggattgtatgggagcagcaggcccttggcctggtgaagctggaggtcggatgctcttgccagggcatggtctagctgggtggtcatctgtgatgggaccctttcagtagtttatataggcaatggatacatgtgatggtccgaggaaagcgttcatcaaactaaccacactgtgtagaggtggagatgtttatcactcacatcctgaccacagctttaggcccagtgactcaatgatatgtggatttcttcatgacataactattcttgcagagagggtggtggcttttgttaagaagagagagtctctgaatgacaagtcttctttttctgctcctgtctaatttttaaaaattcaaattcaaagttggttaagccttcaaaatacttagccgggaaaagtctggaacctctacctctttaaaaattgtttttgacattatttcagacttgcaaaaaagttataagaacattacaaagaattcctttctaattcccctcacccagattcccaaatgtcaatattttattctacccactttacccttttatctgtctgttcatctctctgcccattcatccatccatccatccatccatccacccatccatccatccatccatccattttatccatccatccatatgttttctgaaccatttgggattaagttgcagacataatgccctgttactcctaacttcttcagcgaatattttctaaaatcaggagcattctcttaaagaatcacagtacaattctcaacatcagaacattcacattgatgaaaataaaaataaaagactgtgatctaatctccaaacttatttagatttcagttgtcccaataacacccttgatagtgaaagaaaaatccgcatcatgcaatgcattcagttatcctgacccctcagtttcctttaatcaggaacaattcctgggacttgctttctcctgtaggctatctttcaacttgtttttttccttatgattagattagatttccttatgatgattcaggttatacagttttaacagggatgctatagaagcgaagtggtgttctcagtgcatcacagcagggaacacctgtcgatctgacccatgactggtgatactaactgtgatcatttggtgaaagtgttgtctgccacatctcttcactgtccagttactctctcaccagttgaaattcataagtatcttgtggggagatatttttaaactacgtaaatattctgttactcctcaaaatttcactatgagttttagcatccactgatgattctttcctgaatcaattataattatgatggtttccaaatggtgattttcaaattctgtcatttcttccacatttactagttagttctactgaaaggatgacctttcccttctccttctttatttttaataatagtaacactatttttctaagagactgaggtctttctctgtcaagaccaggagtttaagatcagcctgggcaacacaggatagagtgcagtggtacaatcatagctcactgtaatccccacttctggactcaagagatgtttgagattttttgtagtgagtggtttgtattgtttgtttatgtttgtttttaaaagatagggtcttgctctgtcgcctaggctggagtgcagtggtgcaatcctagctcactgcagcctcgacatcctgggctcaagtgatcttcctgcctcagcctcctgagtagctgggacttgacaggtgtgcaccactgtgcccagctaattaaaattttttttttttttgtacagactgggtcttgctacgttgcccaggctggtcttgaactcctagggtcaagcaatcctcccacctcagtctcccaagtagctaggattataggagtgagccaccacacccagctctctacttgtatcagtgtagactcatagattcttatttcattcaataggttatactcctttactatcgctatttattttgatgctcaaattgtcccagatttggccagcagaagccccttctagctggccactgcatcctttaaacatgttcccatctttcttaggatgtaccctttaaccttgaccgtcaagtaagttttcagagatagaagtgtgaataagtggtatggcagctatatctttccctcctcaccgcttcctcttcatctcagatggatgatgagatgggggattcccccaagaagatctgccgtgagggcctcagacacggtggcctatccatcagtctttttgggagtgtttgcattgagctggtatgattgccattgtcattatcatcacctggcagagtgtgccaagttctatcaattgaaaataaagatacttgcacatgtatgtttatagcagcacaatttgcaattgcaaaaatatggaaccagcccaaatgcttatcaatcgatgagtggataaattgtggtgtatatgtgtgtgtatatatattatatatattatatattacatatataatatatgtatatattacatatataatatatgtatattttacatctatatatgtatatagtacatatataatatatgttatatattcatatattatatgcatatattacatatataatatatgtactatatattatataaatgtaatatataacatatatattatatgttatatattacattaatatatgtactatatacatatattaatgtaatatataacatatataatatatgtatatagtacatatattatatatggtatatataacatatctaatatatatatactatatatagtatatataacatatatataatgtatatatgtgtatatatattttatatatatgtatgatggaatactactcagccatagaaaggaatgaattaatggcattcgcagcaacctggatgggattggggactattattctaagtaaagtaactcaggaatggaaaaccaaacattgtatgttctcactcataagtgggaactaaggtatgaggatgcaaaggcataagaatgatacaatgaacttttgggactcgggaaggaagggtggggggccactgaggggtaaaagactacaaattgggttcagtgtatactgttgggtgatgggtgcacgaaaatctcacaaatcgccactaaagaacttactcatgtaaccaaacaccacctgttccccgaaagcctatggaaataagaaatttaaaaaaaaatacaagcttttctaagagtgaaaaaaaaaaacagtaacacccaaaatatgtcagtccaaccatgtgcctgagctacctcctactactcttctctgagtttgtgccttggctgagattgggaggtctatttcaactcccagcacccctatcttacctcatcctgtctctagcaacctgtccagttgtttctagtctttcttcttccctagactgtctttgccaccagacccaggctcctcaaggaccctgcatgtcttgctcaccactgagctctcagtgaaaacacagatgctgtatatatgtttgttgaatgaatgaatgttgctagtgataatgcatttatgatgctgttaataacatcattatcgagggccagtgatatgcccggcactaattgtactcatgcactgcataatgacgttttgggcaaggatgacctgcttatctcaacggtggtctctacgattataatggagctggaaattgcctctcacctagtgttgctgtagctgtcataacattgtagtgcaattactttattttttaattttattcaattatatttttgaggcggagtctcgctctgtcgcccaggctggagtgcagtggcgcgctctcggctcactgcaagctccgcctcccaggttcacgccattctcctgcctcagcctcccgagtagctgggactacaggcgcccgctaccacgcccggctaattttttgtatttttagtagagacggggtttcaccgtgtcagccaggatagtctcagtctcctgacctcgtgatctgcccaccttggcctccaaaagtgctgggattacaggcgtgagccgctgcgcccggccaattaccttatttttaaaataaatttaatgtagcctaagtgtgcagtgtttataaagtctacaatagtgtacagtaacatcatgggccttcatattcattcaccactcactcgctcactcacccagagcagctgccagtcctgcaagctcagatcatggtaagtgccctgcacaggtgtaactttttttatcctttgttttttgaaacagagtctctgtcgcccaggccggagtgcagtggcgcaatctcggctccctgcaaactctgcctcctgggttcaagcgattctcctgcttcagcctcctgagtagctgagactacaagcgtgtgccatcatgcccagctaatttttgtatttttagtagagatggggtttcactgtgttggccaggctggtctcgaactcctgacctcaagtaatccgcccgcctcagcctcccaaagtgctgggattacaggcatgagccaccatgcccagccacattttttgtctttaatatcttttttttactgtacctttttaatatttatatatgtttagatccaccaatacttcccattgtgttataattgcctgtagcattcagtagagtaacacgctaaacaggtttgtagcccaggagcaataggctacaccacacagcctggggggatagtaggctacgtcatctaggtttgtgtcagtacgctctatgatgttttgcacagcaatgaaatcctctaacggtgcgtttcttggaatgcatccctgtcgttaagtgatgcatgatggtacatagaatgcgttttcttatttaatccccacattatcccatatgaagtggatgctgttagtgtccccattttacaaataaggaaactgaggctcagagttggtagaaacattgcttcccgttgcagctagtgtgtgggagccggagtttaaatgcagctctgactccagatcccttactctcaattgctgagtccttctgcttccgggatagtgttgtcttctgcccaataacaacgtgggttttaactgctgtgcttggagccctgtggaggggacagggtgtccctgtggagcaattcttgagggcagtgacttgcacaccttgggactcaaactgttgcagctgaggtgactttaagaggtacgctggccaaccttaaacatttaaaattatgttaacattttagtgttattagaaaaaaagtgtggccgacacattggatgattcatcagatgtgttcgttgcttaagatgaggctttaacaaaaagtctttttttttttttttttttttttgagacaggattttgctctctcacccaggctggagtgcagtgatgtgatctcagctcactgcaacttctgcctcctgggttcaagccattctcgtgcctctgcattctgagtagctgggactactagcatgtaccaccatgcccggctgatttttgtattttcagtagagacagggtttcaccatgttgcccaagctggtctcaaactcctgacctcaagtgatctggctgcctcggcctcccaaagtggtgggattacaggcacgagccaccgcacctggcctcaaaaagtcaatttaaagaaatggccagtaaataagatggttcttagatatgacagagcatgagaagatggtttacagaatgactgaagtttggaaggtaccaccttaacccatttcctgtttagaaataaaaaaaaatgcagtgtgctgccagcactcatttaatcttacataaacatactctttgaggctgaagcaaatctcactgattttcagtgtgaaaataaaatataaaaactattcttggagttgtttctaaacagaacttgtctctaatcctaatgtgatggaaatgtatatgatgttacattaggattagagacaagagtattctcagggcaaatgggaaatagtttgaagtcatactctcgccacaaaggattggattgaattttccagtgtggatcaaacactcatgaggccacacaggtgaaaatggtgtttgaagttgtatatattatagaagatttaagtgtcgttggataacaggctgggagccatgcggttttccctgtgtttcttcgagggttaattcccattctcccctttgagccatggagccgggttcttggtagggagaagaaaactctcctattcgggaataagctcatcgcaattgcaatttcccctctgtaaactgatgtttactctttttaattttcttttcttttctttttttttttttttgagacagggtcttgctctgttgtctaggctggagtgcagtggcacaatcttggctcactgtaacctctgcctcctggcctcaggcgatcctcccacctcagcctcctgagtagctggaactacaggcatgcaccaccacacccaactaatttttgtaatttttttggtagagacagggtttcgccatgttgcccaggctggactcgaactcttggactcaagccatcctcctgccttggtctcccaaagtgctgggattataggtgtgagccactgtgcccggctggttcttactctttattagttttaaaagtttttggatgagacgaggatgggatgagacttactcagatgaaacgtaaattcaacgaatagttactcggtccttattatgggccaggcactgggagttcagagatggatggggcaggctcttgccagaagaggagacagacagacaggcaaattcctccagtcagtttatgaagtactaaaggagagaaagctgtgaaatttacagacttgatcactttacatttttgaacaggcaagggagtgtttcatttccctgagcagaagggaacagtaccaaggaaaacaaagtgaataaatgacctgggggacattttaacagggccccgtgggatgtatttgagttggctgggcctagagaaatgggtaaaaatttcagtacttattttgacttgattcaactatggtcaaatgaccaaaagtcaggttggcatatctggtgtgtgtaaggctgaccatttccctaccgtttctggaggcagacattcttcatggatcccggtatgacttcagaatccttctcaacacaacactctgggaaaattactctaagtcatgcataaggggcacgttcaattaatcttatttctatcctttcccaaagccctaaattctgtcattttgagcaaatagtttttctcttaatggggatgtatcttagaagatgaaatgcagggaggtaagaaaatgcttggggaagagtgtcatttttaagccgttaagcgtatttcttaactactattatagggcaccctgtggccttacggttctgtgactatcttatagatgcactttctccaagtcacccagaagtgtcatcctacaggcctgttgttgatgcaaaccaagaactgttttaccacaagcggaatgatacattttgcgtgacactggtatcttaaatgcatgattacagttattattattaacatgataaaagaaggagcattagaattagtctcagggatgaggtccctaggaacaaaaaagccagtcttgtatacaggaaaatgcagggtttcctgagagacatcattagtcctgtagaatttatggtttctttttatctttctttgtgataatcgtgttgagttcttgcttctcctcccttctctctccacttggccactggcaggcgccaggcttctgggagggaatgtcacttggttgccaaattaaatgccccagatctattcactctagagggtggtgtcatttctggaaaacagaaagagaaggctctgctctctatcttgatatttgacctgtttaatataatttgaaatgaacctttagtgtgataaatggggagacagaacaattccttgcagggccaacgtctccactgtgctttggcccctgggtggcagcttgagtcagagagggcaggtgcctggcactttgatttaggataatgggggccaggctgcggtggagcagtcacactgaggaaggcaggaacaagtctggagacagctgaggccccagaaacgcacccagaaagtggaggccgtgagggcaaagctgctcaacaccaagtgtgtggcttcggcatgatagacacaaagtaaccacaaaacagtcaagaccatccttaaatgaagctcctctgtgttctctactgaattgggggccaatcctgggttcaccccagagtgaaatcaggccccacctggcactctgtaccactgtatgccagatggaaggacttgatggttagtttccatccatccatccatccatccatccatccatccatccatgcatgcatgcatgcgtccatccatcacacattttaggagggcctacatgaagccaggtctcagcagggattctctggtgagcaaatgaccctgcctttcaggagcttacagttcagcagaaaagaatgataagtcagcagactgaaacaacaatgtacaatgagaaggattaagagggagcgatggggctgacttggaagcaaccagagaatttggagtatggattgtaacttggaatagtcttggaggaccccgggccccagctgttagtgagatgttagtgagattttcatctcttctcccttgcatttggtctaggagaagctccccaggagacatttttgaggcctctttaatcactggatgggctaatgtttaagcctttcattttctctctgtacattccagagaaataatgcctctgtgtagtcgtgtagtttctctctttttttttttttttttttgagacagagtctcgctctattgcccaggctggagtgcagtggtgcaatcccagctcactgcaacctccacctcgcaggttcaagtgattctcctgcttcagcctcccgagtagctgggactgcaggcacacgccaccatgcccaactaatttttatatttttggtagagacggggtttcaccatgttggccaggctggtctcaaactcttaacctcaagtgatctgcctgcctcagcctcccaaagtgctgggcaccagcgtgagccaccacacccaacctgtgtagtctcttgacattcatcaatagcctgagttagttgaactctatttagtgacatcattgggctttccagcactgcattcaaagactccttcatttgttcattcttccattcagcaaacttatttttcggtgcctatgaggggttcagggtctgtataagaggcctggggcaccgagttgcaaaaaaccagccttccttgtaaggagctcagagtctagaagagaaagactgaaaatatcaattataattcagaggggaaagggctggggtaggggaagtaagattcgggcacctaaaacattctagtgagccaggaacaatgttctgaaggaattagcatctgtgacaggggctggcaaattttccctgtaagggtccagggagtaaatacagcaggctcttggcagccatatggtccctgttgtatccattcagctctgttgttatgagcaaaagcagccgtagacagtgtgcaaataaatgggcatggctgtgttccaataaaactttatttacaaaaacaggtagtgggccagatttggcctgtgggctgaaatacgctgacccctgatctaagataagacctaaagagtgagtgggaaatgaatggccaggtaaagagtgggacgtgttcaggcaggagaatagcaggcatcatggcccgggagatagagctggtttggaagaaaaatattaactaagagtggttgtgtggctggactatagcatgcatgtgtggtacggcatggggtgacaggagggttaggaagggctgttttggagttctgagtttatcctgaggacagtcagtaggaagccccctagaatggctctcagcctggagggacaggacctgtcatgcatcatttaagccatggcgcgttgtggcctcaaggcctcaatctagttgctctgagcccctttcttcctattttccattaattaattcttgcaggtatgcagtgtgcctcccaggacacagcagagcgtggctctgatgacacagctgagcagaagtcaatgggaggcactgccatctgctcctggcggctgatggcagaggagggagccctggaccctctcgcagggcggggcactgctctgcatgcatctcctctcatggcctcctggcctacatcccctctgatggaccccgttaggactcagtaatttaaaacgcttgtggtcaggggctgtctggtcactggtaatgaggccttcacctcctcctcctgttccccttaggctagaggcatttattaactcaaattaatagaggaagaagaaaaatattaacaactctctaggcctccagctgaggcctccttccagcatgatccacttcccagaagcttcaaggagagcaggtgagggtcactttctaagtgctgctcagtaattttcagggccaggcgctgtggctcacacctgtaatcccagcagtttggaaggccgaggtggacggatcacttgaggttaggagttcgagaccaacctggccaacatggtgaaaccccatctctactaaaaatacaaaaaattagcggggcatagtggcaggtgcctgtagtcccagctactcgggaggctgaggcaggagaactgcttgaacccaggaggcagaggttgcagtgagctgagatggcaccatggcactccagcctgggtgacagagcaagatgctgactcaaaaaaaaaaaagaaaaaaattcaggaagcagacaccgagtcatccctcccattctagttgtgttttgggatcatcactcatacattaaagaggtggcctttctgtgtccatcagctgaattaggcacaattttagcagttaccacctcacgaccagggttttacctattaactcagggtgggatgcacctgggggtagagagagaactgtggcacctcaggggatctgagcttgacaccagctttgatttcaccttttttttttaatagtatttattgatcattcttgggtgtttctcggagagggggatttggcagggtcataggacaatagtggagggaaggtcagcagataaacatgtgaacaagggtctctagttttcctaggcacaggaccctgcggccttccgcagtgtttgtgtccctgggtacttgagattagggagtggtgatgactcttaaggagcatgctgccttcaagcatctgtttaacaaagcacatcttgcaccgcccttaatccatttaaccctgagtggacacagcacatgtttcagagagcacggggttgggggtaaggtcacagatcaacaggatcccaaggcagaagaatttttcttagtacagaacaaaatggagtctcccatgtctacctctttccacacagacacagtaacagtctgatctctctttcttttccccacatttcccccttttctattcgacaaaaccgccatcgttatcatggcctgttctcaatgagctgttgggtacccctcccagacggggtggcggccggacagagggcctcctcacttcccagatggggcggccgggcagaggcgccccccacctcccggacggggcggtggctgggcgggggctgccccccacctccctcccggacggggcggctgctgggcggagacgctcctcacttcccagacagggcggctgctgggcgggggggctcctcacttctcagacggggcggctgctgggcggagacgctcctcacttcccagacggggcggctgctgggaggaggggctcctcacttcccagacggggcggctgggcagagacactcctcacctcccagacggggtggcggccgggcagagacactcctcagttcccagacggggtcgtggccgggcagagacgctcctcacctcccagacggggcggctgggcagaggcgctccccacatcccagacgatgggtggccgggcagagacgctcctcacttcctagacgggatggcggccgggaagaggtgctcctcacttcccagactgggcggctgggcagaggggctcctcacatcccagacgatggacgtccaggcagagacgctcctcacttcctagacggggtggcggccgggcagaggctgcaatctcagcactttgggaggccaaggcaggcagctgggaggtggaggttgtagcgagccgagatcaggccactacactccagcctgggcaacattgagcactgagtgagcgagactccgtctgcaatcccggcacctcgggaggccgaggcgggcagatcactcgcggtcaggagctggagaccagcctggccaacacagcgaaaccccgtctccaccaaaaaatacaaaaaccagtcaggcgtggcggcgcgtgcctgcaatcccaggcactcggcaggctgaggcaggagaatcaggcagggaggatgcggtgagccgagatggcggcagtacagtccagcctcggctcagcatcagagggagaccgtggaaaggggagatgagggagagggagaccgtggaaggggagagggagggagaggggagaggggagacgagggagagggagactgtggaaagaggagagggagagggagagggatttcacttttataataataataatagagacaggatatattgcattcttaccatgttatgggcattgtgctaagtgccttatatatagtatcagtttatagcatcccacgaggtaggttttatcatcatccgttgtagtgaatgaaactgaggtatggaggattacataacttgctgaagatcacatctccttgctcaagggcacagggatcggcaagctaccaccctaccacctgaggcccaaatcttgcccaccacctgtttttgtaaataaagttttattagaacatagccgcacctattcaatgacatattttctttggctgcattcatgctactatggcagactggagtagttgcaaaagataccatatggcccacagagcctacaatatttaccatttggccctttcggaaattgttgcaggctcctatcctagctaataagtggaaaatgtgatacaaacctaggttccttggacccagaggctgaagtcatgatcatcagtgctacgctgcctctatattaccatttctatgcttaccactttttcatacagcaggttttaggtccctgttgttttccggaatcctggaccatgagttctttgagagtaggacctgtcctattcatctctttcatttctcagtttaacacaggactgggcacattgttaaaggctcaatgaatgtttgtcaaatgaatgaatggatgggtgggtgggtggatggatggatggatggatgcatggttaaatggtttttgcagccttcccagcattggaagccgactgtcagtctagtgctctccccattacggagtgaacgtgagagaaacttcataatgagggaccttaggtagggacggaggtgaatgacactgtgttgactgaagataccagccccatcatttccagccctcatcctgccaggcagagtaatgtggaggtccctggaagccagaggaaacattctttatcattcctttcgacagatctcttagagttgtccttgcctgtaatttagactctgaacattactaataccctgttgtcgtatgcaactaatatttgtcacccctatggcaagcagaatcttgaatgtaaattcatgtggtcccttccctattgctgaggcagtcaatgcatgagaggggtgctcttccctgggtcagctgggaattccacgcagaagcaccagcagcatcaccctcaatgttaggttgtagactcccgaggggcactgattctatttcttactggtaaaaaaaaaaaaaaaagtttcctgctggtgacttcattttctgtagccatggcatttgaaaaacaccttcatgcacagcgctgagtttggccccctagcagcattttgaagtgggtaccgctaaccgcattttgcaaaaggaaactcgcatttatggagtaccagttccttacatgcgtgtatctcttacaacaaattatcatttcacccatttgtcagatgaagagatggcatcaagagcccaggtaagaagcaagtctcagcacttgaactctggactctcagatgccaaagttcatgatattcaacccttcgtcacatttgcagtgaccccctggcatggcttggccctgagtaaggacagcatagaggacttttgtctaaggccacttcttccctactgagaccctgtgagtctgcagctcagcccaagcccctgcatcacctgagatgagagcttagtgcagctgtgtggtgagggcggcacggccgttatccatgcttggcgtgttttgcagcgctgggggaacacacaggttgctcaccagacacagagttctgagtttttctcagttgtccatttaggttttcaagattattcctgaagtgtggggcagctgggggctttctgggagccagaggggcctctcagaagttaatgttccattccaggttataatggacagcagctgggatgtccgcctgggccaatttgctttgagcatctctgcaaacttggactccggtgaagaatttgtgagcttacttaaccatagcgagcacaggtgtaacaaaatgacagaagttgtcagtgtgttggtctttttctcatatgaccattggtctttttgtcacatgacccttatttgccccttatctttatggaagaggacatgcttcctgatttacctttctcttctctttagcttctttaccacttaaaaagctgaggtataaattatatacaataaaaaccacagatggtaagttcaatgagttttgatggaggtatatccctagatacccactgccccaatcaagacagaatatttctcctccaccccagaaagttctctcatgtccttctccgatcatcttgccccaccctgaaggcaacccttgttctgctttttagcacatagcttagatctcttgcagaacttcacgtaaatgccatcatatagtgtgtacccttttgtatctggtttctttcactcaacatgttgtttttgagatacatccgtgtgttgtatcagtgcattcttttgtattattttatagctacatattactaatattttcttgtgtgaatataccatcatttattggtccattctcattttatttgtttcctcgggttgctgtaacaaagtatcacaaacgtggtgacttaaaacaacagaattccattgtctcacagttccagaggccagaagtcccgagtcaaggtgtgggcagggatgtgctccctctgaaggctataggggagatccttccttgcctctcccagcttctgatggctcctggcaatacttggtgttccttccttgtcttgaggctacatgattctaaactctgctacacatggcatcttccctcagtgtgttcctcctcctcctcttcctcctttcctcctcctccttctcctcttgttcttcctcctcctcttcctcctccttcttctttctcctcctcttcctcctccttttgttcctcctcctcctccttccccttcttctccttcttctttcttctttttctgctccttcttccttctttttcttcacagggtctggttctgtcacccaggctggagtgtagtggtgcactcacgtctcactgcagcttccacttctcaggctcaagtgatcgtcccgcctcagccttctgagtatctgggactacaggtgcccgccatcatgcctggctattttttttttttttatagagatggggtattaccatcttgcccaggctggtctcaaactccttggctcaagcagtcctcccaccttggtgtctcaaagtgctgggattacaggtgtaagccagcacacaagccctcttttcttataagaagaccagtcattagatttagagctcatcctaatcaagtatgaccttaacttgattatatctgcaaaacccctacttccaaatgaggtcacatttacagttactgggggttaagacttcaacgtacattttttggggctgcatttcaacccactatacatctggagtgcttccaggttgaggttattgagagtaaatctaaatctacttagaacattcttgtacaagttttttttgttgttgttgtggaaatatattctcatttctcttgggtaaatagctactaggagaatccctaggtcctagcatatgtgtttttatgtagcttcataagaaactgccaaactgttttccaaagtgcttgcatattttacaatcccaccagcaggtgtgacaagttgctctatatcatcagtagttctcaatatggggcaattttgaattttgtcccctagacaacatttggcaatgtctgaagacagttttgctggccataatttgcagtgaaggggacagtgctgctagcatctggcacctggggagagaccaaggatgctgataagcatttcacaatgcacagggcagcccccattcccaggccccagtaatgggttatccagctggaaagatcaacagtgctgaggctgaaaaatcccgccctatctccttgctaccacttagcattgtcaggcatctaactttattcatcctaataggtatgaaatgttatcgtgttttgctttgtgcttctttaatgactaaatatggtgaacatctttttttgggacttactggccatttctctcccattttatgtgaatatgtgaattatctatttaaatctcatgcttatttttaaattgggttatctttttaaaaaaatttttattttattttattttatgttttttttgagatggagtctcgctctgtcacccaggctggagtgcagtgatgctatctgggctcacggcaacctccacctcccaggttcaagcgattctcctgcctcagcctccctagtagctgggattacaggtgtgcgccaccacacccagctaattttttgtatatttagtagagatgggacttcaccatgttgggcaggctagttttgaactcctgacctcaagtgatctgcctgcttcagcctcccaaagtgctgggattataggcatgagccaccacaccctgcaacctctacctcctgggtttaagtgattcttgtgcctccccctcttgagtcggggggcttacaggtgtgcaccaccatgcctggctaatttttgtattttttagtagagacagggtttcaccatgttggccaggctggtctcgaactcctgacctcaggtgatctgcctaggtgttccaaagtgctggaattacaggtgtgagccactactcccggcctaataatttttttaatgtttagtgctttttgtgtcctaagaaatctttgccaatcccaaagttgtcaatgttctattttcttttagcagctttataatttttagcttttgtgataggtttattatctatctcacattaatttttgcatatgatgtaaagtaaggatggaagctccttattttccataagaatatccagatgttccagcaccatttgttgaaaagaccacctgttcctcattgaatgacttgatatcttcatcaaatgtaagttggccatatgcatgtgggtctacttcaagactctctgttctgttccattgatctactagcctgctcttaagacaatgtcacactgccttgaagacactgtcttacctctctggcctcttgtcttttcatctgtctcctctgctttttcctctttcaacttcccctctttcactgggctgggggtgagtgcagttgggagacaaaaactaagctatattttgcttcttgttatttctcgtgcctttctgcagtctacctcctttgccatcttttgtttttggggtgtgtgtgtgtgtgtgtgtgtgtgtgagagagagagagagagagagggaattaagccagggataaaaagtaccagatgcctgccctgagcatccctgttcttgttaaccagttttctttcctgtttactgttttcttctcagcacctaagttctcacttgccccaagagcatccagtctaaacagattggccaagtctattcctcctcttgtctttgactctcttgacttcttgaaatccctccctcccacccgaagtcttcctggaatcaatagaaaaaaaagtcatacttcttcttttctaatgagtgactcatcaagccaggactgaacactcacaaacaaccctcgctacaagggatcaaaaatgtgccttgtctctgttgattcctcccatttattcttggcatgttcttgtgcatctgggctgatgctgctggttatgtctgggattgcacagaccccctgcctgtttgatgtggatcatggagcatccaacagtccagaactgcaggcggccgggggtgggggggcaggtttttttgctgatgatccagagagatgatgcttgttgtgtggctaccagcagcaaagccacctaaagtctcatgactcttcagaacaaaatggcaagattatattgcccattgcatcattatttagaaaaagtgtagtttttatatttgtaaatggtggatcagaacctgggctaacacctcagtatctgaggaacattgctacttatttttaggtatagtttggtagatatatgttatttttcttttttttttttttttttgagacagggtgtcactctgtcctgttgtccaggctggagtgcaatggcacgatctcagctcactgcaacttccacctcccaaattcaagcaattctcccacgtaagcctcctaagtagttgggactgcaggcacacaccaccatgcctggctaatttttgtattgtttggtagagacggggtttcaccatgttggccaggctggtctcgaactcctgacctcaagtgattcgcccacctcagtctcccaaaatgctgagattacaggcgtgagccactacgcccagcccgaaagatatatatttaaccctatctttaaaacatattatgttttaaagagtaaattgaaataaatagtaagaacaggatttaaagacagcttgagtttaaaatacttatcaaaatgtgagattttcttgatatctatactagtactttgatgtgagaaatacacaataaatgttatttgcataacttcaaaaatcccgtattagatttttttaaaaaatgatattatgaaatggttgaagactcacaagaaatagtgcagatgctccttgtatcctccccccaactttcccccagtgacagtatcttacataaccacagtatgaaattgacattggtacaatactgttgacttaggtacagatcttatttggatttcaccaatttttacttttttacttgcattttttgagcttttattttttttaatgatgattttattgtccaaaagatggcctagcaatatccaagaaaattttggagtgagaaagatacgagttcccattccagccttgtcacttatctgtgagatcatggatgattcattcattttctgagcctcagtttattcctctgtaaaatggagttgataatatctacctcttacggttgttgtgaggcttaaattcagtgacttatacaggtatatcatgcttgggaactgttgtgatgggttggttgaaaaatctaaactcatggaagtataaaatgaagaaagcagtttacttttagtttaattaagatacgtggaatgtcttcttttccatttttagtgacaacttgggcagatttattcacttttggctggaagagcttaaagcagagaaggtctccctggtgttggtgtggtttggtttgattcttcggttgtgagtgatctctttgtgaatggtgaggatggattcctctggcctgccttcagggtcatcctgataacctcccctgccactgaggggcagcctggtctcattgacttcctgaatggcacccctttggtcctttttctggtggtcacctagacatagagaactcctgccatccactggccctcaggctttcccttgcagccatgggaatacgggatacttctcgcactctcttggtatggagagatctgggatggagtggggagtatctgcattgcctcctctgactcactacttccatgtccccttgttacaggaaaggggtcctgatccagaccccaagagagggttcttagatctcgggcaagaaagaattcagggtgaatccatacagtaaagtgaaagcaagtttattagaaaagtaaaggaatgaaagaatggctactccatagacagagcagccctgagggctactggttgcccatttttatggttatttcttgattacatgctaaacaaggggtggattattcatgcctcttctttttagaccatatagggtaactttctgacgttgtcatggcatttgtaaactgtcacgatgctggtgggagtgtagcagtgaggacgactagaggtcactcttgtggccatcttggttttgatgggttttggccaacttgtttactgcatcctgttttatcagcaaggtcttgatgcctgtatcttgtgctgaccttctatctcatcctgtgacttagaatgccttagctgtccgggaatgccgcccagtaggtttcagcctcattttacccagctcctcttcaagatggagttgctctgattcacacacatctgatatcctcaagctgtttggatgtaggtcatctagggttcccccacctgcagaaatgtctaggcctgcattgtctaatatggtagccactagctataggtgttaattatttaaatttaaaagaattaaaattagtgtgtagtggcatgcaactgtagtcccagctacttaggagaacgaggcgggaggatcacttgaacccagtttgagaccaacttgggcaacatagcgagacccttaaaaaaatgttaaaaaaaaataaaattaaatggaattacacatttaattcttcagttgcactagctgtatttcatgtgctcaataaccatatatggctggtggctgccatattggacagcacagatataaaacatttccattatcataaagagttcttttggacattgctggtctaactaatagatcccccatcttacggctaccgatgttagtcttttctaagaactgccccacctccctctgcttaaagggtggtaccagtggatggccatgagatgcataatttcagcagacatctacttaagaaataagatgccagtttcttttcttgtagacacccctagggagtaggaatgcactctgtttgtgaatcctatgccctcagaaggtcaaagaccaaaactcaacccatctacctcctcttcttctggggaggaggcagcagtggtcgttgggaagtgggggctcaatctgccccctctttggatccttgtgggaaggagtttgatctcggctctgactcacaggtagctctttttagaaagtagaattattttatgtcttatttttagatttgggtataaactataattctgggacaacagcagaaatcccacttgatagccaattacactgttatcattaatagtattattctgaccatatagccttctatactattctacaactatggaagtaaatgaccttccctttctcacctacattcatagatagttgttcattatatcgtaagcatttacccacatttctatttcaaatgggagtttccatttttagatgggcacataatgttgcattgcattggtatccatgcttctccgactatttctctttcagataaagatttccgttatttccagaggtttggtgttactagtagcaccactgagggcatcttggtgcataaaacttcttgcttttgacgacttcttttctttggagaaattttcctggaagtaggaaaggtattgagcttatgaacttcttaactctttgtcaaatttaaactcccctccccttacaaattacaggtctgatggccgaatgggacctaagaggatctgtagtcaatacctgtcactgtcatctttgttatatacacaactctcctctttccagcttcatctcattccctcctgcctcagggactttgcttatgcttttgtctgtgcctcttctttgtgttcctttcctccttgtaattaattcctattttttccctgagatctcagatctgggctcaagatcacttctgctgaaaaatattttcttactctatcaccttcaaataagccagacccccttgtcaagaatagggacctgttctttctttcatagcatttatcgtgatgtatgattagacgttcatctgtgtaataagcagtctgatgtttgagcccttggttaagaccaaagggtggagcttatcattgcctggcacacaagcacttagactttgtcgaatgaataaacacatctgatgcaaatttacagggatgccaatcaggatgctgggacttttatcgatcttgcctctgcctcgtgttactttaaacaattcctttttaggcatggggccaaattagggattaaaaacatctggagcctattaatgggcttcaagggttggtgaacactctaatattatatatacaagtgttgtgcagacaggtgcacctggggaggaaggtggtagagggtccatggcttccatcatgagatttttaaagagggtagcaaaccttctaaatgataacagccatcagcctagatcattggtgtggtcttcacaacacccaagaaacaggcctgcttccctgtaattgaagggagttactcacccagcccctggctgtgcccaatcagggcatgcctggttcagcagggatgaaccatctatagaaatttgactctgcacttcctccaggcactttgcccctgtctgaagaagaataagaaatgagaaatgctccctatacccagcttctctcccaagcttccaaacttcaagttattgagtcactctgtctctgcatggaaggagtgatgaaggagtggagaagggccaggagtgggatgctggcagaatttctttcacttggaaaaagacattgagggtaaggagaagcattgcccttcgcccccaacacactaacctcagaagactcttatagttctaatattctcagactctgttcatatagtcatacaagaccaatgtttgaaggaggcttagaagggtcatcttctttgtaattgcttgttggaatttggctaaacaatttattatgcaattaatgcatgttcattttgcagaacttgcaaactctgatacctaatagggcctgtcaggaaactcaaatggttgaagagggtctagcataagatgacaaatggcaactgacatttggcttcagggtcaatgatttacaatagggaatggtggggagtggggcaaactggagcacccatgcctcatctaaagggggaagccactccttctttctagctgactgttgccacattgaatgcaagacctgaattgttggccaggtgctgtggcttacacctataatcccagcactttgggaggccaaggtgggcagatcacctgaggtcaggagttcaggaccagtctggccaacatggtgaaaccctgtctctactaaaagttcaaaaaattagccgggtatggtagcacatgcttgtaatatcagctacttaggatgctgagacaggagaactgcttgaacctgggaggtagaggttgcagtgatccaagatggtgtcactgcactccagtctggactggggtggagggggggaaagacctgaattgtttcaatttatcaagaaaaagtggaagcatggaatttttcatgtgaaattttcctgtttttgtaaatgttgccaatgaatctacgtttaaggtttgtatgagccaaataaagtttgtctgcattccagatgtttctccacaggccatagctttgcatagtaaaatttaaaccttacaaatccatggaatagagttttctttgaagtccacctaaacagaaaaccctctgggtccattgatgagcggctgtttaggagactggaagtcctctccttttagagagatagtgactctaaatcatcaccttagaccttgtcagtcagagtctccatgttcatgatggtatggcagaggggacatagcggggatcaacacgcagctgaaaggccatgccttgccagagctggtgttggcatgtgtattcaagccctatgccgaagaggctaaaaatagtcccaagtgtttgggtggctgctttgtcttaactacttccaggccctagacaactgtcacctcattaatcttcatggcagggtgcctggcttagaggacaaaactgagcttccaatgcatatgatttaattccagctgggcatgtgcgagcctcagtttccccatctgcccctgagccactcattcaccaacctcatggtctgcctgaggaggtgacaaggaccaggacctcagggtacaggtggaggtttcctgggtggcattcccacaggaggtttctgccaagcagcaagaataaaaccctgaaagccgtatttatttaaagaccattaatccagttctggatcattccaactggagtgacttgtctaaaatttagtgttgctgagcaatctctttccttccatggacagtgaacaacagggtttcagtaaagtggttccagaggaaatgcctttgttatgatcctctttgcattcccaaactttagaagagcttctttgtatttaattcataatctagttataaaagatttacagcagcacctctagacaatactctgttaatccagatgaagttactgtatgaattgaaagtcataaaagtaattttcgaatgcattattttttatctctttctaagtgtttaaatctcaacttaaactggcttctcccacaaaatgtatttgttggcttttgtaactgcaaagtgcttaggaatggtgggctttaggtacggttggatctaggtgcttacacaaatgttggagaaactcgccccctgctccttggtagctttgctttctcattatggccagctgccttcctcctccctctgtgtctcaagtagttccagaaagagactcaattgcctcagtggaaagagaaacttctttctctaaggttgctgcaaaagtcctgagattggccccttgtgagtcagcttgggcgtcttgcctatcctgaaaccatctttgtgtccagagggatggagtaagctgattaggacaggcacacgtgcatgcacgcgcgcgcatgcacacacacacacacacacacacacacacacacacacacacctgtctgccccacacatgccacatggatggatggtagatagactaaagtaacagatgtcatctacattttaaaataatgaaaacttcaactcccagtcagcctaaatcatatagggccctctttttttaatttttatgttttatttttgagatagggtcttgctttgtcacccaggttggagtgcagcggtgtaatctcggctcactgcagccttgacctcctgggctcaagcgatcttcccacctcagcctcctgagtggttgggatcataggcatgtaccaccatgcttagctaattttgcttttttgtggagatgaggtctcactatgtggcccaggctggtctcaaactcctgagctcaagcaatcctcctgtctcagccttccgaagtactgggattactggcatgagccactgtacctggccttgggctctctaaaaagtgcagctggcaatgtgcaattataagacaagaggagtatgtctaaatcatcaagtttccttggcatcattgttactggaaagattatccccaaggtgggctgggagagtggatcacacaccaactttggtgaacttcaggagtctgaaaatagacttgtcttgccaaactcctcagcttctacagttctgaaatttacctggaaagagagtcaatagacttgaaaagtcaaactatgagcatcagaagttgggaaagctggaggaagttgggtcatatccaggagccagcgtgggaggaaataaaacacttggagatttagaaacaaagccagaaaatctcattacagaagagcttgcatttgtatagatttttttcccaggcactttcatatccattatctcatttgagctacatcacaaccctgcatggttggcaggtcagaaattcttatattcatttgtcacatgaagaaactgagacttattgaggttaattgactggaccaaggtcagagagctaattagtaagaagtctgggaatagaatataggcagttctagaccagcactaccaaacagacatgtaatacaaaccctgtatgtaatttaaaagtttctgatagccatattagaaaagtgaaaagaaacagttgaagttggttttaataatttattttattttaccaatagatccaaaatattatttcaataagtaatcaacttaaacacttgagatgttttacattatgtttttccatgtggagtcttcaaaatctggtgtgcattgtatacttagagtacatctcaattcagactagccatgttttaggtgccctctagccacatgtggccagtggatgccatattgggtggcatagtctaggctgtgcttggtgtaatgggtggaggccatacttcagagtaaatttttctgggtttcaattcattcatttagttcaataactatttattgagcatatactatgtgccagatgctgaggataaaatggcaaatgagaaagatttgatttctgccttcatggaaggcatatgctaatggaagagggtgacacaaaacaaatttacaaggaagtaaatacagtaatttcaaagtgttccaggtgctatgaaagaagcagacagggtgctgagattgagacttatacagtgatcatgaagacctctctgttctgctgaagctgaggtcagagaagaggccgtacaaagagtggaggtgtcggggggatagaggagcatgttccagggagagagaagacatgtgcaaaggccctgaggcaggaaagcatttgcatgttctaggaacttaatgaagaacagtatgactggggctatttggaggatgccttgaaagagactcaactgacttgatatccaaggtaccagatatatggcatgttgttgatgaatatttgttacatagatggatgggtggatgggtagatagagttatggacaggcagaaggatgcattcattttgtattgtctgtggctattttcgtatgacagtagcagaaatgagtaattgcaacagacatcctacaccctgtaaagcctgaaatatttactttctggcccttaacagaaaacatttgctgacctaagatctataaaatggggaaaataataacttctttaaacaactgtatggggattaaatgagaggaggatatctcttgcctgtcccagtggctggcccttggtacaacacgcaacaaaggtgaattttctcccttgcgctctgctccacatctttctctgggctccagctccagtgcttgggcacctttcttgttcacaggcagctgaaatggggactgagtttcctctgtgggtccctcaattattcctgaatgttgcattttattttcatgggggctgcgagctagaatggagttgtccatagcacatagaccctgctgcagggatccccgggtgggtcgacttagggtgtttcataaatgttaattacagctctgcttcattttgagggagcacagattcttattgcctcactggagagaaacttagactgtgccctttaataagaaaattgtgtctcttttgccactgtggaattgtgaatgcgagcatgaatttagatgagaatttatgtatccaggggcaacacagaaaagcaagaatccccaaaatacctgctcaccaccaggagagttttttttctggggctctgaaaaaaatatcagagcattgggtggaatttctagattcctatagtgacagccagaagccaggacacatgatggggtgactgcaaatgccctccacatagcatagaatttctcaaccttggcactgctgagatttggggctgcataatttttcgtggtggtggctgtcctgtgcattgtagatgtttagcatcttctctagtctctatccactagatgacggttgcactcctgcccccaagttgtgacacccaaaaatgtcttttgacattgtccgatgtcccctagaggacaaatttgtccccattgagaacagggactttgtgagtcgtgaggcagctgttacagaggactgggctgagaagcagagagactggattcaaatccccagagtgcgtgctgctagctgtgtgaccttgggcaagtcacttcacctctcagaagagaatcgttgcttcaaaggttgtggtaaagatgaaatgctgtcaaagttgcaggcacaaaataggttctctgccagtgtcatttctttctctccctatggcccctctcctctcctcctcttccttttcgctcttattcccaggctctgagaatctttcccctctttgctgctccctagggggcaaacaggtgcaatcttccccaaggtttttttacctctgctcttttttcttgcctttcctcaggagaatcagcataagaggcgtacatgttggggtgaagaaaaagttgcatttgattacttaaagttcccttcagagaacggtgcagtttatcatttgcagcctcatgaaagagttccacctgccgctccaaaaagaataatagatcagtaagatttgaaccttaaatcggctcatcctcctggaacagtgacaggcatttgaatgaatatttaacgagccagactttgataatgaagagctgctgctccccccctcactccatcccgcccccaaatcaggaaagaaaattcctcttcttcactctgacctcttagatgaatgagaaaaggatgaaatataatttgggggaataattagcactcctcagtccccaaacctcacaggtgatgctgtgctgaactcatttaactctgacttagaagcaatgggttgctggcatcagggagctggagtcagagctgttgaaattgactcagcctcagggagtaatttgtgttttcgcctcatcccttagggagcgggtccacctcacctctcactccagaagcccttctccagctctcattagggctgacagaaaacaggagagaggagagagtgagaggacagaattttggaggcttgaaggactttttctttcctgtcctgttctgtccttcctcttactgtcccttctccatccctcacttttcctattttaaattataaaagtaatctgtgctggtgtaacaaatgcaaactacacaaatgtagatagagtaaaacagtgaaagcccccattccctcctgccccaattttagtcccaaagtcattgctcttaacatttgttatgcattctctcaacatttgttgcacattcctttgaagaataataactaaggtgccaaaatctatatctgtatcagagttccccaaagagacagaagcaataggagacatctctatgtctatctatctacctatctatctactgtctacttagctatatctatatatctgtatctattatctatagacatggataatgataattgatatagctatatctgtttatcatgtatctatcaatcatctgtctacttagatatatctgtatctattatctatctatatatatctatatagacatatctataactatccatccagatatatctatatctatcttctatcttttatctatctatctagatatacatatatctatatgtatctatccaaatatctatctatatctataatctatctatataagtatatatatatttatatatttgtctagatatctatatacatatttctctctatatagatacatctgtatctatatctattatctatctatatctacttaaataatatagatgaatgagaaaaggatgagatatatctgtatcttgcttctgtctaaagatatagctctatatagatatatctatagcgatctatcatctgtctatctagatatatctatatctatttacctaggtagctatctatctagatatagatatctctgtatctatcgatctctgaatgaatgagagggattgattttcaagaattggctatgtgactgacccaaacctgtaagccctggtggtctgccagtggcctggcagaagttgatgttgaagtcttgagtctgaaggtattctagaagtagaattccttaccatgtgccagacactgtgttaagccttttaaatgcattttacaatttactcctcgtaagcactctaggaggtagggaccaagctcattgccccattttacaggtggagggagtgaggcccaagaaggagcaggtgagaatgtcttgttgctgggtgggcatctgggcagggaagagctgccccttctgactccggctagtggtgtttctgtcacggctgagggtctcagcagctgaccctctgtcttgttcctacgtgtggtctttgtggcttctcccccatttccccatctgcttccttggcctgagaccctgtccccagacttcatcccttcttgggaagattttccactacttcccaaagccaaggcttcagagaagtctacccccttgagaggagcgtgcaggcatcttgttattagtagagatgaggctattgctgatggaaaataaggaatgaggccacaccttgggtttctacctcacctgccacttcttgcctaggaggacaaggaccaagaagcctggtcattgctaacatgggagtgagacatgcatgagctcacttgaagccccttttctggacctgggagggttggcttgggtgattcaaacctggatcttgggtgcctcacatgcaggcagtccccatgggatggagccttgccctgaggccagctctgcctccatgcaggacagccaagggagaacctgagaaaagggcatggctcagcggtgtctccctgatccccacacttctggggcaactcttcatggcacaacccaaccacagaggggtccctggggcttctttctaaccacaggattgccctctgctttgtatattatagcagagagctaagggcatctctgcaagagcttaaggtgatgttgaatacatagaaccatggagaatttcagaaagatccttccatgagaaatcaaagcaagaagtatagccaaagtcctcagagtttctggcctgtataatccatagatctttctgcatcccagactcctgtcttcctaggaaggatagcaatacacataatggtaattagcaaggcctgtcaatttcacctccaaaatctatttcaactccatctaccttgggtgtgtccattcccattgctctgtccaggccaccagcatttgcacatctccacgtgcttccctccaactgtgattgccttcctccaaaccatattccagacagcttcagccacattggtcttccatgagttcctgcagcctgcaagtgcttcctgcctcagggcctttgcacatgtcttctctctccccatccccattctttgcatggctgactccttctgatccttctgatctcagtttcagccactcagagagcccatcctgaccaccctgtcatcctcaatctcagctcctggtgtgtttccttaatggcacgtgaggcactttaaaattgttttatctatctcatgtctttgccctcttgaaatttggggtctggaggctgcaatggtctttaaatagataattacacaaagagatataagttataaaattatgataagggataggaaagaaaatgtagagtgcaatgagaaatgaagatagggagaggatctgacttagactaatggttggagatggtgtctctgattaggtgacatttgagacaagcgctaaaggattgtagacatgagccaagtggagaatggagtgaagactgttccagacagagggaacggcatgtgcaaaggtcttgaggcaggaatgattttagaatgttcattgaaagaaggtcgacatggatgaaacatggtgagggaggaatatgagacagtgcaccagggaattatgaagggggcagagcatgcattaaaaaaatatcaccatcatgatagtactgaccgtttatttaaccctactatgtattagaccctgagctaaaagctttatatagcttctttaattcttacgatcatggatatgattattctcaaggcaccgatgaagaaactgagtccccaaaggttaacttgcatgcccaaaaccccacccatacggctggcagaggtgaagctcagatttgaacccatgactccaaagcttttagataccacaaaacacttgcctctgtttaccctctgctccaacatcacgctcctctgccaaaggatccagtatagggaggtgtgagtaccccagactatgtgataatccacctcaggacagagctttctgcccagccctaatacacactttgctttgtaatgcacttgaatgttccattatttccatgctcccaaatgctctgaaactttcccatttccttgttaaataaaagatgagaggcggataatgaaatccagatgccctcgaggccttctatgtcacctgccaattttcccgttggtcattttttttttctttaaacaaaacagcagcgatggtttgatggttcggagcaagaggccgtattcaaatggcatcattacctgtcggggctcgctatttttttcactcatttctctcctcagattcagggctcgattcaatattccaacattcttgcagctggtttttcaaataccaatgggatgccaaaggtcctgtccagatccatctcctcgagagctgggagtagattcactccatgaccctctttgttaggatgagaaccagtgtagatcaagactttttacaatcaagtgcgcttagtatctcctctcccatagtccagtggttctcaatcttggtgattttgccccctcccaggggacagcgggcaatgtctggagtccattttggttgtcacttggggtgggggtgctactggcattgtgtgggcagatgccagggatgctgcctaacatcctacaatacacgggacagcccctcacaactaagagttatctggccccaaatgtcaacagtgctgaggctgagaaaacctgaatttagaccatgatttctgtgagcagctgttttgctaaccgctgtgtccccagcctggtgcactgaagtagataaaacagagagctgccaggcacagtggctcatgtctgttatcctagcactttgggaggtggaagcagaaggatcccgtgaggccttctgagcaggccgagcaagatagtaagaccctgtctctgcaaaaagtaaaaaaataagccaggcatggtggtgcatgcccatagacccagctactctggagactgagatgggaggatcacttgagcccgggagtagtgagctatgattgcaccactgcactccagcttgggtgatggagtgagaccctgtctcagaaaacaaaaataaaacatatagcccaatgattgttgggtgcaggtcatgttccctgagaagcctctgaaatggagaataggatgcaggaagttaattagggggtgctttggggattaacaccagtggaagagaaatatggaagcaaaatgggtgtgagaggaacaataacagctcccccaaagatgtctgcacccttggaacctgtgaatttattgtgttactttacatggtaaaagggacttcgcaggtgtgtttaagttaaggctcttgtgatggggagattataaggacaaaagtccttataagggggaggtaggagaatcaattagaaaaaaggagatgtgatgatagaagccaacattgcaatgatggactttgaagttggaggaaggggccatgattcagggaatgcgagcggcctaccattttaggcttctaacttctagaactataaggtcataaatatgtgtggttttaagccgtttactgttgtggtgatttgttacagcaggaacaggagatgaatacgattgggaagtgggaaaacgcgagctatgatgcagtctcaacagaggccttagccaaccttacagccaggtctcctgccggaatgaccctttagtactgttgcacattgaaacaatcagtattagatgtgggcggctcctggaaggaaattgaccttgggcaaggcagttgttttcagcctcagtcaattgttggagagactgacagcagagagatattctctggcaatactatcatcagctgggggtgtgaatccttcattcttccagggggtcctgggtggcacattacagtatccactacactaggtattagctactatgcgattagtaagtgatgaggcatggtgattagaatcactggctttgggtctagtctgggctagattcaggttctggtgctactactcattaaccgaggcaggtcccttcatctctagtgggggaaatctcagccactacctcctggttctcagaaggttcccatgagataaggcacagagagcctgacactagaaccactggactccactggaccctggagtcctcaagttccggatctgacttaacagtttcagttatcactatctgacttaacagccaaaagcagaatcacaatggtttaattaaagccatggatccgctgtctcctaacatttattttgccaaactgtcataccacatgaaacgctcaagaatgatttgtcactatgttaattttgaaaattctgggtgctatatccttgtatagatatccagtgcacaaataggagaattaaaggctctgacaaggctggcagcagagatgtccatttcacttcatttacactttgaatttcccaagataatttgcatgggggactcctttttcatgcaacatctatcagcatctcttggatccagtatggtaaggatcaccctaggggaaatactaccagagatcattgatccaggaagccttagagagcaagcttaggcatatttgcaacccctatcccctcccagacagccacaccttggtgctggttttggagtcagaataccagttgaaatagatgggttactgtgaggctagtctagatgactctccgtgtcctcattttctcttgtttgtcttcaagattttcctctgtttctcaaggccggagtgtgcgcctggctcacaatgcttagtactctctgtgcagtaacttcatttgttttctgcacaacccacatgccaaaatactcttattcctcatatcccacccctttctatataataggaaaccaaggctcagagaggccaaggcagtagctcagggtcacacagctagaaagtgatgcagctcagctttgaaccctggctgtccaagactacaactaacccttcctttttattctattctttttaaaacaagtttatcaagatatagtttgcacaccacacaattcatccatttaaagtatagaattcaatggttttttcgtatattaacaaagttgtacaaccatcaccacaatccattttaaaacattttatcaccccgaaaagaaacctcaaatatcttaactgtcacttcctattttacccccatccctacacctccctgctcccaactagcccctggcaatctctaatctgctgtctctgtggatttgcccattctgaatattacatatgaatggaatcatacaatatgtagtattttgtgtttgacttctttcattcagcataatgttgtcaaagtttattcatgtagtgtgcattcctttctatggctgaataatattccattttgcacacacacacaaatatacatacacatacatatatacatacatgcatagcacattttgtttatccagtcctcagttgatgggcatttgggatgtttcaattttttagcaattattgctgcaatgaatattcatgtacaagattttgtgtggacatatttttccatatctcttgtaaccctcctgtttattacaatgtatattttattgttatagacagtatgttgaccaggccacttttttgaagtataattgtatttatttatttcttaacaggtttattaaggtataatttatatggcataaagatcaccattttaagaaatagaattcaatgcattttagtaaatttacagagttgagcaacctttgtcttaatccagttttagaacatgtctgtcaccctgaaaagatctctcatgtctgtttgcagtgaatccccacttccagcagagctccaggcaaccactgatcggctttctgtctgtctacatttgtgactgagctacttttatatctgttacccaagcagaatggctaatgcagagagagaagaggttaccatttctgaatgtccactatgggaatgtgaacagaagacaggcagcttggccaagtgatttcacctctttgaggctccgtttctccatctgtgaaatggggttggtaattataggtgattaacaagattggaaattataaagaggggatgcattccaaacactcagcctaacactttgggaggccgaggcaggcggatcacctgaggtcagaagtttaagaccagcctggccaacatggtgaaaccccatctctactaaaaatacaaaaattatctgggtgtggtggcatgcacctgtaatcccagctacttgggaggccgaggcaggagaattgtttgaacccgcggggcagagattgcagtgagccgagattgcaccactgctctccagcctgggcgacagagcaggactccgtctcaaaaaaaaaaaaaaaaaaaaaagacccaacaacactcagccaaccactccgcacagggcaggcactcagttaaccataaacaccatggtcagcacctcactttgtctgaacggcttgtgaggcaggtgtcaccagccccattttacagaagaatacactgaggctcacagtggtgagtgacgatactgggaatgcattccagattggtggattcaggagcctgagtcctatccacctctccagctgcccagatttcccagcaagaattcccaaagaggggagcattcccagtctatgcaggggcaccccctcttcatcctcaacttgtctggcaggttctaagtgcttcgttatggcccaatctatcaggaaccaattagggcccagagcacttagctacaagcctggtttctggggactgacagtaatgaagcagatggaacctgtcaccaggcagtgcaaggcacattcagctgttcgatgtcaagccaaggccaagttgaggctggggctgtaggacctgaagttattggcatgaggactgggttagagacctctgctaggtgtcccgtgggggcccaatcagtgcacctgccactgtgcctagtggggtgaggaaagggtgtctctgaacccattgtccggtgtcttgtgtctctgattccaggctcctaataggccctcagtaaataagtgggcctgctgcataaccagaagagtgttggagcaaatgaatggagctggcattttgcagtgcaggttgagagatggatcttctcctctgggagcgtctgttgcctgaccagttcctgctctctagtatggtcttagcttcctgggagaacttcccaggatcccttcgctaggctgtgggcatcttatcagctctcagagtccccaggactgcccttctgtagcattcacattcactgtaatgaactcatcctttataggatggactctaagtcccttggaggcaggccctggcctgcctagctcatagtcatatcccggcatatcctagcccagggcctggcacaaaggcgtcccttaataaatatttgtggggcaggcgactgaataaaagttcagacaaatgagtccttcccaccttgtcgcactctttaggttagagtcaatagctcctaattaaaataatctcatccccagatccttcttcattgtgtacttttttttttttttgagatgaagtctcactctgtcacccatgctggagtgcagtggtacaatcttggctcactacaacctccacctcctgggttcaagtgatcctcctgcctcagcctcccaagtagctgagactacaagcgtgtgccaccatgcccagctaatgttttgtatttttagtagagatggggtttcactgtgttggctaggctggcctcaaactcctgacctcaagtgatccacctgcttggcctcccaaagtgctgggattacagctgtgagccaccgcacctggcccttcattatgtcttgagcttggtatagagaagaggtcagcatacttgtcctgtaaaggaccacagagtaaatattttaggctttatgggtcacacaggctctgtttcaccagggttttgggggatcccttctctccccagtggtctgggttgcaggtgaggctgtgttgatcaattattaaagagactgtagaagtaagctctgagatcagtagcaattggattttcttggctttacccattaccagcttctccttccacactgaaaacatgcttttccatttgcctgcttggccagagacagcggtaggtgggatacaatcttagtggctgcagctatttggaaagttgagtttccataactaaagactgttgatacgaaagacttttcaggggcacctgcagctcaggaaccattcaccaccaagacatgaatatgcatttgttccatccacgaatatgaatatgaaatgccctccccaatttcagataatcttgaagattataggtcttctattggaaccccataggaagcagtgcacagatcaaataatgccctgaaaataaggctaagctcttacccagaaattgcccaaatgctttctgtttatgttaatgcatcccagttgtgggtatgtgcttttgccctttttctccccagtttctttgcaaagtaaagagacttgctgatttcatcctgttttatttacactgcatggagagggggtaatttcagggctcacagtccatacctcatgcagttggagttctcagcatcctgattgggaggacgtatgccccggcagagcaggtctggaagagattggtatttatggagtctgtttgccttaatttcttttggcctataatcctgctctctgggaggattgctgggtagctgtgtgtgtttgataaattcagcgtcacttaagacacacaagtggtttttcagtgggaggtggaattggccttttaagaacttcaacgttcaatttctttgctgtttttattgtgaccaggagatcagtgtcatgaagtttaggaaagttttatccttctagcctgcagtcttcatagcagggaaatggccttgatgtttttattagtggatcccaacatctagcaccagggccagggggaggcaactgagggacatcaggggtggcatttagggaggtgcccactctcaaggttgggtatgtctctgagagtatcaacttaaatttagtatcctaggcacctcatgcaccttaccctactcatagtcctgcctagcacactgtcgttgctccttcagtatttgttgagtggacaaatcaattcctcttctatgtaacaaagtgagactaaaagaggtgaaataatttgcctaagatctggccaatgacaacttctgaatgtgtgatttgaacccaggcctgactccagagccatctgcctttctctttgtctctctctctctctctctgaccctggtttgatcctggctttcttctgttccccctcgtttcttgggtgggcttttccaaagagtcgataagtctgagtctggagagaatgagaaggaaacaagtttattgctggaaaactgtccttcctcactattttcccccttgggctccctgaggagctggctggcttccactccagtcagttgtccagctgtgaaaagagaaaaatggcccaaacatgtaataacttagctctggaggatctcattctgagctaagtatcctagtagccagagcggagctttcaaaagggccacggtgcactggccagcagctctagccatttcactgaatttctgtccatttgaaagtgattggagactttggctcggtgtctgggaatattccagcttggtgggggaagaggggatccatggataaaagtgatccttaatagggaagatagttctgtcaacactgaggagtgtgtaagtcaatgtcccggtttgacaccatccataggcactgaagttgtctctgaaaactttgatatggtttatgggaagatgaatcaggctaaaccacctattcaccccagggacttttctgtttccttcctttttcagtttgatggatctgtttgatatttggttagagactcaatttttgaggttcactaaattgcacttcctttcattccaacagtcattccaatatttaggtgtctattacacatcaggtgctgtgtagatagctcggtgataggggtgaagaagacacacatggtccccaccctcgtggaacagatctgataagatgattgaatctcacacctttgcaatggaactgacaaaggctaccaacgcgaggtgcttggtgttgggagggcctgtaacagggaatcatgttggcccagtgacattgggggaggcttactgaggggaaggaggatagaactgctgtctgaagtgtggaagaaactactggggagcagacaagggcaacagcatgtgcaaaggccctggagtgggcaagggagcatgttgcagttgcacttgagtgacaaggaagggtggtgcggctgaggagaaagagcaagtgggaagggccagatcacatagcagccttggaagcagtattagtttcctgtggctcctataacaaattaccccaaatttgatggctgaaagcaatagaaattttttcttttttagttctggagactggaagtctgagcaaggtgttagcaggtccatgctccttccgaaggctctaggggaggatcttcccttgcctcatgcagcctccgttgctccagaaatccttgacattccttggcttgtggctgaatccttccaatctctgcttctgtcttcacaaggccttcttctatgttctgtgtcttctcctcttgtgtctatgtcaaatcttccctgcctttctcttacaaagacacctgtcattggaggtaggacccagctggacaatgcaggttgattcatctcaagatccttaacttaattacgtctataaggaccccccttttgccccaaataaggcaacattcacaagtcccagtagccttttttttcttttttggagaagcaccattcagcccactacagagatgatgctaaagaatttgatctttattttatatgctttgggaagatgctgaaggattttcagcaaaggtgttggcatgaccagatttatgattttataaagtcttccagcctggtgcagtggctcacacctgtaatccccgcactttgcgagtctgaggcaggcagatcacctgagatcaggagttcgacaccagcctggccaacatgatgaaacactgtctctactaaaaatacaaaaattagctgggtgtggtggtgcatgcccatagtctcagctaggtgagaagctgaggcaggagaatccatccccttaaacccaggaggtggaggttgtagtgagcctagatcgcaccattgcactccagcctgggtaacagagcgagactctgtctcaataaataaataaataaacaaacaaacaaagttttccttctattgtgcagatggaggatggatgagcagtcaggtggagctaaaaggttagttggtttgtgtttttccccagtcatctagcaagagataatggtggcttatctcctggggtgatggagaggggtaatgttgagaaatggatagaaatacttaggaaatacaatgggagttcctttttaccatctggaatcatttattcggtgttgccctgcatggtagcaccgacattgggagttgtacaaaaacctgctaagaggatgtttcggtcgtctgaatgaacctttctgtcttatctgagagatactgacatttgctcccacgttgaggattctcctcattacatggctttcttgtgaataaatgttttctttactgcggttaatagcgtcttcaccaagttaagcacatacagaggcaggaaggcaattatagcacaggcagactttatatatctccgtagcatccgtgaagcatcattatttttcagtgacttattatttttttataataaccaaacttgtcctgtgcaggaaaaatacatgaggaaggcaatttggtgctcactgttggttgcacttcatgttcattaaggaccttgttctactacaatgctgtggtcagatcatggctggataggcaaagtggtagatggacaatgacctccctgtcacatggaatgcgtaggtgaggctgaacaagggagctaggcaggtggttgagtctgtgggctccaggatctgaggtcctgttgtcagatcctgcctccaccaccctgtagctgtatagccttgggtaagtcccaaccattctgtgtcccctctgtaaaatgaggataacaatacagtcatgggccacataaccacgttttggtcagtgacagactgcatatacgatggtggtcctgtaagattataatggagtgctttggaaggctgaggcaggcagatcacttaagatcaggagttcgagaccagcctggccaacatggtgaaaccggtctctactaaaaaaaaaaaaaaaataccaaaattagtgaggagtggtggtgggtgcctgcagtcccacctcctcaggaggctgaggcaggagaattgcttgaacctgggaggcataggttacagtgagccaaggttgcgccactgcactccagccagggtgacagagtgagactctgtctcaaggaaaaaatcaaaaaagattataatgaagctgaaaaattcctatcacctagtgacgtcatagccattgtaaccttgcagtgtagttgctttgttttttaatttagtgtcacctaagtgtacagtgtttatgaatcctacagtagtgtacagtcatgtcctaggccttcacattcattcaccacttactcactgactcacccagagcaacttccagtcctacaagctccattcatggtaaatgccttatacaggtgtaccgttttaatcttttatagcgtattttgcctgtaccttttctatgtttagatgtttggatacacaaataattacattgcattacagttgtccacagcattcagtacagtaacatgctgtactgatttgtagcctggaagcaataggctacatcacccaggtgtgtagtaggctctaccacctagatttgtataagtacattctatgatgtttgcacaatgacaaaaataacctaatgcatttcttaggatgtatcactcttattaagtgacgcatgagtactttattgggctgctgggagaattaaatgagataatgcatggataatactcagtaaaagggtaaccataattctctctgccattttacataaatgccataccattgattcattcagaggtatttattgaatgctgagcacatgctatgcactaccttaggagctaggcttaaagcagaacagatcatccaaaggccctgtcttcatatagcttgatgaggggagatagacaaaaggcacataaaccaatgaatagacaaaatgtcagatgaagattattgccgaacactaaatgagagcaaggtcaagaggtagaaagtgttaaggagagagctgctcttttagatgaaggggacgggatggcctctctgatgagggcttatttaggcagagaatgaagtggtggagcaagccatggggatttctacaggaagatttcaggccatgggaactgtatgtgcaaaggccctggggcagccagtaagactctgatgggcccagtcaggagacaatcagaagatgaataaacaagaagaaatataatgtcaagtggtgctaggagaaaacaaggaggaaaataaagctgacgagtggatggaacatgacacaggggaattctggaggctttcagggtttggaagtgggtttggagctctggatctgggtgtatgtgctgtggatgaagctaggaagggatgacagatgtaatgattaagagaaaaagtctggccgggtacagtggctcatacctgtaatcctagtactttgggaagctgagttgagcagatggcttgggcccaggtgtttgagaccagcctgggcaacatagcaaaaccttgtctctacaaaaaataccaaaggaaaaaaaaaatagctgggagtggtggtgcatgcccatagtcccagctacttgggaggatgaggtgggaggatcacttgagcctgggaggtagaggctgcagtgagctgtgattgcatcactgcatgccagcctatagtgagatcctatctcaaagaaaaaaaaaaaatctgagagacacccaagaagccattaacagtgggacgtctcaggagttcaactaagagaggaagagaccaaggagatatattaatttcctagagttgctgtaacaaagtaccataaactggatgccttaaacaacagaaatttactgtctcacagttctgggggccagaagtctgaaatcaaggtgggagcagggttgattccttctgagggctggaaaaagaatctgtcctatgcttcttgcctagcttctgcttctagtgatgtgccggcagtcttcggtgttcttcggcctctagaagcatcactctggtctctgccttcatcttcacgtggtgttctctctgtgcgtgtctctgtgtccaagtttcccctttttatagggacatcagtcatatgggaggggtccaccctactccagttatgaactcatctaaatttaactaattacagctgcaatgaccctatttccatatcatattacattctttgatactggagtttaggggacttcactatattttgagaaagcacaattgaacccaaataacaggggccactgaaacctttttttttttttttttttgagatggagtctcgctctgttgcccaggctagggtgcagtggcgcgatctcggctgactgcaacctccgcctcctgggttcaagcgattcacctgcctcagccttctgagtatctgggattacaggcatgtgccaccatgcctggctaattcttgtattttcagtagaatagggtttcaccatgttggtcaggctggtcttgaactcctgactttgtgatctgcccgccttggcctcccaaagtgctagggttacaggcatgggccacagcgcctggcagaaagctttttattgaagtgtaacatatatgtagaaaatgcatatttctaagcagatagcgtcttgaactttcattaaataaacatacctctgtaaccagctccctgatcaagaatcaacattttctgccctccagaagccctctgggggtggaggaggcttctgtttttcaatatgtaccttcctatactgttttaacatttttaaaatggtgtggatttactttaacaataaaacttgcaaattaaacttgcaaataaagagctcatattattaagtttagggacgctgtccttcctgagctgatagggaaccttccatctcgagggggaggaaagcagcttcgtttgttctctgtgctgggtgcttttcaaagaagcttcccaaactagcgtccgcaaaatggttaaaggcgcattgaaatatcaatgtgctctgaactctggatgcctggggcagctggtgtcccctcatctgtccaccccagtgcacaaattatgtcattttctgggtgtgtcgtgatgtgaaaaagattgaagagcccagcttaacacgtccagtctcaggaaaccctcccagcgacccagggaggtaggtgcttctagttccattttataggtgcagaggctgaggctctccaaggtgacttcctagaaacagtttcttaggtgttttgtggatgttatctgggcctggcaagggaaagtcacagaagtccttggatgcctggtaatcactcattaatgaacataataggtagtcttaaggtagatttgggctgaaagggccctttgggagaatggcactatccaacccaatgcaatgcctttacaagaaagattaacatcactaaaatatcacagctggtcagccacagagctggatctgaatccccttccaactcccaagcccccctactttgtacaagaccatgatactcccccccaccagtgctaggatgtaggtcacctcttcttgccgaagggaaatctaaggtgcagtgaaacacattccaagtttgtctctaaacctgtttttttcttggcatccactgtaaaatttatccttaaggacagctcagggtatcttaggacacttactgccatgattacttttgaaaatgtgtacactttgtgcttcattcccttttggggttcaccgtccactgcttttcttatgacccaggtaatgtgtggatcatgggtggagtgggacctcagagaaacccaagccggggcccagcagcctccctggagtggcaggtggcaggtggctttgagctgtacttcagtgggccggagttttatggctcctttgctaatggtcataaacttggcatttacttttggtacttggggagtcctgaacctctaattaaattggctctgagcaggtggagagcacacagctagaaacgatatttaacagctgcagagaaggtagaagggaaccagcctcagcccagcccgccgatggcttctctcactgtgctggctgtcagctttcacttgcacaagttcagcttccatttgccaacggatggcagtcctgtccctgctgtgggtcttggtgaccctctctttggccttcctgaagaagagcggcgacctttccggtgtctttctctctcttccccacaggactctttttccccatttcaggtcttcattatcagagagtgggttatccccttgccaacagatctctttctcttttttcctttttttcttgtttttttttttgtttgtttgagacaggatctcactttgtcgcccaggctggagtgcagtggtgtgatcacagttcactgcagtctcaacttcctgggctcaagtgatcctcccacctcagccccccaagtagctgggactacaggtgtgtgccaccccatccagctaatttttttttttttttttttgtagaaatgggatttcatcatgtttcccaggctggtcttgaattcctgagctcaagggatccacccaccttggcctcccaaagtgctgggattacaggtgtgagccatggtgcccagccccaacacatttattttattgcagcaaaatatacataacagaacatttgttatttaaaccacttttaagtgtacagttcagtgatattaagtacgttcacattgttgtgcaaccatcaccattatccatccccagaaccctcttcatcttcccaaactaaagctctgtacccattaaatttctcattctccttccccagccttggccaaccatcactctattttctatctcgacaattttgactgttctaggtacctcatagaagtagaatcatacggccaggtgtggtggctcacgcctgtaatcctagcactttgggaggccgaggcgggcagatcacaaggtcaagaaattgagaccatcctggccaacatggtgaaaccctgtctctactaaaaatacaaaaattagctgggtgtggtggcgtgcacctgtcgtcccagctactcgggaggctgaggcaggagaattgcttgaacctgggaggtggaggttgcagtgagctgaggttgtgccattgcactccagcttgaggcaacagagtgaggctccatctcaaaaaaaaaaaaaaaaaaaaaaagaatcatacaacatttgtccttttgtcactggcttttttaacttagcagaatgtcttcaaggtttattcatgttggagcatgtgtcagaatttccttttttgtctaaggctggataatatttcattgtgtggatagaccacattttgttcatccattcatctgtcagtgaacacttgggttgcttccatttgttggctattgtgaataatgctgctgtgaacatgtgaactgctgtgaaccagtatcggtttgagttcttgctttcagttcttcagggtatttacccagaagtgggatggctggatcatatggggtatcagtctgctctcatgctgctagtaaagacatacccaagactggttaatttataaagaaaaagaggtttaatggactcacagttccatgtggctggggaggcctcacaagcatggtggaagacaaaggaggagcaaagtcacatcttacatggtggcaggcaagagagagcttgtgcaggggaactaccatttataaaaccatcagatctcatgagacttattcactaccacgagaacagtatggaggaaacgtcccccatgattcagttatctccacctggccctgcccttgacctgtggggattattacagttcaaggtgagatttgggtgtggacgcagccaaaccatatcatatggtaattctgttttcaatttttagaggaactgccgtggtgtttgccacagcagctgcatcacttcacattcgcactagccatgcagtggggttcctgtttctccacctcctccacacctttttgtagtgtcctttggttaaccctttcacttatcacctaaaacaaagttcagtggccaagtgatgacccttcaatcagtgttgtagaccaaagaatatggaattggaagaaagtaagttattcaagaggcaagagcagagtgatttagcttaagggcataggcgtcagagcatgtcttctagaagcctgattttactgctcagtgggcagacaacttgataaatgagtctcccctgtgagccgcaggtataccatctgtcagtggggatgacggtaggacccacttcctggggttgggagcgctccatgagattgtgcatataaagcatctcgcatagggcctggcagtacatgagcactcccagaacatcactattatggaaaggaggtatttatccagccagaacttattaagcacaacttactgtatgctgaggaccatgcagacatgctaggcttgggcattcacagacatgactattgtctattacgattgttgcttcttgagacccagaccttgaggtggtcttttgaagcagccacccatcttcagtgacctgagcagagatgtgggggaggaggatgtgtagtttttggaaaatgaacttccctttctagtttaggaatgttctaccaagtcagcacaatcctctaggcttccgtggagggtgaatgggaagtcatttgtggcccataggtggttcattgtagattgattcttactctaaagcatcttctattaatattctatccttattcaattaaacaaggccaacagacccttggtatttatctcacactgtgttttcatttgtctttatttatttgttctgttcactttgggggtcagtcttggctgcttgaggatggggtggtgggttggtggtaaagacctccagaacctcggcctcccaggcttcctcttaggcaaccatcccgcctcctcatttctttggattacacagtcttttaaaaaatgattgaagtggaaattcacataacgtgagatcgaccactttaaactgaacaattcagtggcctttggtacagtcacagtgttgcacaaccaccacctctaaatagttccagaatattttcatcatcccaaaaggaagccctatacccattaagcagttactcccagttccctagcttccccctatccccatggcaactgccagtctgcattccatttctgtggatttgcctgttttagacatttcatataaatggaaatcagacaatatgtgaccttttgtgactgctacctccttcacttggcataatgttttcaagattcatcatgtctcaaatcgtgttcttttttatgggtggctaatattccattgtgtggatatgccacaatttgtttatctattcatctgttgatggacatttgggttgtttccatattttagctactgtgaaaatgctgctatgaacataggtgtacgtgtatttgtttaagtacctattttcaactcatatatatatatatatgtacgtgtatatatatgtgtgtgtgtatatatatgtgtgtgtgtgtatatatatatatatatatatatatatatatatatatatatatatatgagtgaagttgccaggtcatatggtaattctatctttaattttttgaggaaccaccaaactatttcacgccagctgcaccattttatatcctcacctgtgatatgtgagagctcatatttctccacatctttgccaatgcttattattttctatttgtaaaattatagctaccctagcggttgtgaagtggtatctccttgtggttttaattttcatttccttcatgactaataatgttgagcatcttttcatacacttgttggccaccatttatgtatctccttcggagaaccgtctcttcgtgccgttcgccatatgttaactggattgtctttctgttccctttcctctttttgatccatatttgtaacctccccttcccttaagcctctaccagcctgatagcacaggagtgacaccccgcagaggcaaaggaacacagacttgttgccagccaggtctggatggaatgccacctctatgtgcccttgtgcaagcagcttccattatctgtgcctcaattttctcatctgtaaaatggggaatcctctatcacctatatagtctctgaagattagaggtaatgtaggggaaatgtttatcccagtacccagtgtggggagggccctcaggagacatgaacacttcttcctagcttgattttatttcctgctctaggcttaatttgcagctacagcatagcccatgagatatactaccttgccagatgccttagcatccatcagagatctgggatagatgctgtagatagtgctggagccagccacacagcatagagattctgcaccatggagaactggaggcaggagggagtcttttggaagatcttgatgtgatggctctggcctgcacccggcatggccttcagtgggcagccgtctgtctatgtcaacctgccaaacctcactgatgcataattcattaatcttggtgctgaacatggcttgaaactcacaccgaaggcaacagaaccagaagacaggagagtttgcctaagtgggagggagaagggaggctcttatccagtttcctaggtggctgtggctcaaggcgagggtcagtgactcagtgtcccctggcaccatctttctttgcagcagtaagacactgggttgtgtcatttcccaaggacctaaaagttgtatctgacattgctccctgagtctaccagttgggatgcccgttaccctggattccagggcactgtggaacaaagcgtccaaaaatgcagcaattttgtttctcctctaaaatccacttgcacagcttcccatttctcctcttatcccctcaaaaatgcagcccagattcttttgaaagtcacttttgcaacattgtcaacccatgctgggtcccacttgaagccctgtccctgtgtttgagagtaggtttgccgattctcttctacatcagaatctgtttgcctgtgatcggaaaacactgcattgcatttacagatgtggtttccttggaggtgggaatatttaccttcggatctgagaacctgcaggaccacagaccagcttttgtgcatggtgagaacagagaaataggtctctggatacagagcaaaaggttttctcagccactgaagtaccacagtgtgagccacttttgatgtgataatgtgaggatgacaactcgtttttgttgttgttgttgtttttaaggtcactgccatttaattaacctgtgtgctggcagcagttagttcaagacatttaaatgagtaacacacagcatattgctttacacatgctcatgacaagggcttagaatagtagttgagttgttcgttttccaagttgatagggaaagactgtgaggttttatttttttcgccattcttttatctttttttttgagacagagtcttcctctgtcacccaggctgaagtgcaatggtgtgatctcggctcactgcaacctccgcctcccaggtttaagcgattctcctgcctcagcctcctaagtagctgggattacagacacacaccaccacgcctggctaattttttgtatttttaatagagacggggtttcgccatgttggccaggctggtctcgaactcttgacctcaggtgatccacccatctcagcctcccaaagtactgagattacaggtgtaagccaccgtgcccggcctttttccccattctttcaacaactatttcttgagctcctgttgtgtgtcagggtctgttctatagactggggacataatggtgaataagatttccaggactttgccctcgtggacttggtattctaaaccagaggttggaagactgtggccatggaccaaacttggcccacagcctgtttttgtaaataaagttttattggaacacagctttctgtcttcttccctccttccctccctccctccattcattcttccctccttctctttctctcttccatcttccttccttttcttcttccttctctcctgccttcctgtttccttccttccaaatcacacatgcattacacacatgctaggcattttcactgtaaaagattctcacacatagtcaaatttgggagttccccccaccccccttactctcactatctttctcagtttaaacccatctagctctttttctgtgaccataactacctcatatcaacatataatgaaagtgtccaaacattatataaatgcatgtatacatatttatatttatatttatatttatttgtataaatacggtcatactatatgtgttgttaggcagttggttttcttcataaatcaatgtatcttggagtttgaaacatctgtttgtgtagaccaggggtcatccacccatgccccccggggccaaatctggcctgctgactgtttttgtaaataaagttttattaatatacagccacacccatttgtttatataatgcctaggactgcttttgtaaaggcagaatcgagtagttgcagtggagactgcatggcctgcaaagcctgtgatatttactatctggccctttacagagaaagttttcacccctgttatagaaccacctcattctttttaatgactgaatagtgttctataatatggatgtgtcatatttttattaaatcactctcttattaagacatctctgctttgctgcacctggcatggcctttggtggatgacccctggtctacacaaagagatgtttaaaactccaagatacattgatttgtgaagacaacaaactgccaaacagcacatatagtatgatcgtatttctacaaagagaaatagatataaacataaatatgtatatatacatttatataatgtttggacatattcattgtatgttggtattaggtagttatggtcacagaagagttggaagagtttacactgagacaggcagtgagagtaagggggttggaggaacttccaaatttgactatgtgtgtgaatcttttgcaatgaaaatacctactatgtgtgtaatgcatgtgtcgtttgcaaggaaggaaaaaggaggcaggagagaaggaaggaaagaaggagatctgctaaatgagttgtgaccgggtgtctagagtttgacataaacactatgggcttttccagtggggaaggcagaggaatctgagtcgtcctccaaacttacagcagcagtgacttcatggcgtgtgcagttgtatccctatggccatcctggagagtgtcctttggcagcacattttcttcttgcttctggcacactcgaaacctgatcgagcctctatggactaaaccttcaggccttagagtctggttcttggagggcctgagcagacactagcatgtgaaaagtattttgcttcagagcatcagccaatgtcaaacctgccaattggacactggctgatgttatcggtgtagaattatgatgcagagagtggttctggggagcttgaaatgatctttggaaagcatgataaaatgcagatttgtgggccccaccccaaaggacttgagaaacttttgagttgcgggtacttagtctgatttagtgaaaaaattgagctatagactttttttttctgagacaaggtcttgctctgtcacccaggccggggtgcagtggcgtgatggctcactgcaacctccgcctcccgggttcaagcgattctcccgcctcagcctcccaagtagctgggattgcaggcacccaccaccattcctggccagtttttgtatttttcgtagagacggggttttaccatgttggccaggctggtatcgaactcctgacctcaagtgatccacccatctcagcctcccaaagtgctgggattacaggcgtgagccaccacacccggccaatagactttttttttaaaagggaattcagctttaaaggtttcagaatacgttagagacgagatctttggttgcaaacaacagaagccaactctatctaacttaggctgaaaatgaacttgtttgggatattatgggataactctcaggattgacaggaaagctggagacccaggctcagaaaggggcaggacccaggtgtctttgggctctaagtagcagggatgacttgacagctgattttgggagggaccactactagattgagcttcaaatatttttttccatcgtgtgtcatgctgttgaagattcatattcccaagagagactcagattggtctgattggcacctggtgagttaggggaaggcagtgtaccctagttgacacccccaataaggttgtgcacagagtaggagagagaattccccgaggtggagtggggtgaatgctagacggtcacaaaaccagtgtcctctgcaagacagcagtacaggctattggctcagatattgaaatgcctgagtccggctgagcaggaataattacatagatgaacacgttaagtgacaatttgcagcgagcccaccctctatactgtttgatcccaaataagcaaattttctaccctaacaagttcatgctggatgcaaaagttgaaagcacatcaaaagcctggctttgaagaaacccactaatttcaggcaacagttcttcaaactctcgtggaaaaagagattcagactttgtttcctggagtcacagtaggagagccacgactgaattattagaaattccacactggtgggatcatacttgctgatgtttaattgcactctctgctgagctcacactgactcacttgcccccacagaagcaaggggcagacaaagaggcaggagaggttatcctgttgtataaataagaagacctgaaaccacacagattctgacctgcccaaggtcgtgctggaagcttggaaaagagggagcagcatcacagaatcgccgctttgagggtggataagcttttaaggatgagttgctctaagcccctcattttacaagcgaggaagctaagagctcactgaggttaagcaactagccctgggcacccagccagccagcccgccagccccagcatcttctgagtcctctccaagccctcaggaactggtagatactgttcgttgtctgtctctcgggctctgatgcgtggatttcagcgtggatctcatagaatcatagattgaaatatattccaatttaggcatgtttgtaaggattcactctctgtttattttttcccaggataaaggaagcatctgtgaaatatcccataggtggcaaaactatcagtttccttgagtaaaacatttctggctgacctcctgcttgcacagagaagggtctttacgggcttaccacctgagtagacaatgatcaatgatgcatttgcttagaacactgactctgggtgctttcctatggagatgctggagtgttgagaatccagatgacaatgagcttttttatccaggtgttacaagcaaatccaggtcctagggagtctgtgatatattttagggttaagacctttggggtcagacagaaccaggttcaaatcctggctctgccccttatatgctgtgtgaccttagacaagtcgcctagcctctctgaccctctgtttcttcatctgcaaatgacagatcccatcataaagaataaaatgaggccaggcatggtggctcatgtctgtaatcccagccctttggaagaccaaggcaggaggatcactttagcccaggagttcaagaccagcctaggcaacatagcaagacctcatctctgctaaaaaaaaaaaaaaaaaaaaaaaattagctgggtgtggtggtgtgtgcctgtggtcccagctactgagaagactgagacaggaggatggcttgaaccctggagattgaggctgcattgagctgtgatcacaccactgcactccagcctggatgacagaacaagaccctgtttcaaaaaaagaaaaaaaaggaataaaatgagctgatgcctctgaaatgcttagcacaaagccaggcatgtaggaagggtgaaatgaatggcagctgtcataattaggaccaaggtacctgaagcaaaaagggatataaagggaccttccgcaaatctttgctttttacaggaggggaatcagcattaaaatccaaggtaacttaggtaatgacagagctaggtcaggaattcatcctcctgcttctctatccagtgatcttatccactcaacatgtggcctctggtggtgggttgggggtggggcacctgacaggccaaaccactccctgccctgtgggtcacatgggctggaggtggggatgcagctatttcctcttctgggcccctcccctctgctgtcttctacagcctctgatttcgggaatgtttgtgagtcaaatgactccctgttccactctttggccccagagggaggccaggagatgcgggcagaagctagcactggccatttctctgggggcccatcacttactgggctgatggaagcctgcccacaccatcagccccggggagacagtgagagcagacctctgcgccaatttatcttggaaattgtcttttcttcaggcaaggggaggaggaaggaaacctaaaagaaaacatccagccacatggccgtgaaatctctgcccaaaatcagtcatcctttttaataatgagggctgtcacgagctctggttcagtcggaaatgatggcctgtgtaaatatttggtctgtaaccgatttatgggtttgggaacaaaaaaataagattagtcactaatcacagggatgcaggaaaatcaacgggcctggacgccaacacagatcaggcctaagaggcaaagtccgggtcgctgtctggatgagctcaggggatggtggaggaggctgggctgtgctgtgcagtgggtctctactggaagagggagccatgggcttctggattattccatggggcagaggcagcattgtcagtgtccagttaaagaactggctgagaccagcccctacccctcccctcccagattgcaagtctaagattgattctccttggctaaccctgaaattgacaacctgtttgcacaggtacctctgtaaaatgggaacacatgcgatcaactcttacggtagaattaatagagtgatgaggaactagctttgaaatccgccagaactgccagcacactccagcctgtgttgaattgtgatctgcatacattaattattgggaacgccggttaccttaactacaaaatggaagtcataattgctccaaccccaaatgagataatgtgtcatgagcacagtgtccggcccctggcatgtgacacagagagaacttggtgctgacataggcatttgtatgagaattggaattccctccccgaagtgggctggtacaggcacttacctctcctgccagctaaaccccacataaccactctacacagtaaatgcctcctattggaaatatgtatagagggtgggtgccagccttgcctctctcatggcatcgaggaaaattggatccactggagtgccaccccctccctgctcatttccatggaaagcccgtgagcattcatgtaatagtacagtggaaacacttggattttcatgtatttgtttagttaaactgtttttatggagctgttactatatgccaggctttgtgctgggtgctgggagccagaaagaagttaaacacaacccctgccttcccagcactcccaaaccagtgggagaggcccatactcatcaagtcatcagaaaaatcagtgtgtacctcaaaactgtggtcagagcggtggagaagacctaacccatcccaggaggggtgggtcaggatgaggaaaggagagacactagataaagtcccagtggcagagatgagggctctaggggagccaggtgatgggaagtgggattcaggggctactcttagtgttttgttttcacttcccaactttcaggtaagtctagatcctattagaacagtggttgggaaactacccaacctactgtctagcccaggggccaagttcagccaattgcctatttttgtaaatagctttatcggaacatggtcatacgtgttcacttacacattgtctgcagctgagtttctgctacaaagtcagaaatggagagttttagtagagagcaagtgacttgcaaagccgaaggtatttcctctctggccctttgcagaaaagatttggcaacctctgcatcaggacatctttcctttcctctccctttctttattcctctcttgccctagacctgaagtgtgtcttagtggacaagaggggaatatgtatttaagggacattttgttcgttcttcaaatctagccttggtagaaggtctgttaggtatcaagagatgatttgtcactgagcgaagtttaatctctaaaataagcactatctagctgttcttcaaacatcttgcatatttttcaggtgtaaatgttccaatagacatataatatacacatttatgtaggtataggatatgtgtttaatttctaggaatttatacctaactacattttcatttttgccaactaaatccaagataccagttaccagctgacttatagcagccatttaggaaacaaaaatccaactcaaatttgatcttcaatgtgtaacttcttgaaaaaataatgaaatatcatcaaaatattaaataacagttgactctgttatttaatgtctgtttctctgttttctagaatttttttcctttgacaaaaataaaaagaaaacattctaggcaaaaaaaatagtatatgtcatatactatttatatatgactactatataactaaaaattgtgttttatttttataaaggaatgcttctgttactaaattcaaatggtagagacaagtctaaaagtaacgaagtatctactccccaaatccacagccccctcacctgccaactgccccttgcctgtctttctagaaagtgttgatacgtatatgtgcctgcatcttagactgtacatctatttgaagcttcaacttaggaggcatctgactcctctgcctctcacccctaacacactgaaactgctggcaagtcctgggagagctgagtcccctccctccaacctcatgacctccaccctgctccaatcctccatcctctcttgcctgggtgactccaacaccctcctttccagatcccccaattccattcttgctgccgttcttgttccattcttgttggtcaactttctacacatctggcagagtgatctttttaattttaatattaagttctgagatacagccaggcgcggtggctcacacctgtggtcccagcactttgggaggctgaggcagcgggtcagccgaggtcgggagtttgagaccagcctgaccaacatggagaaaccccgtctcactaaaaatatgaaaaattagccctggtgtggtggcgcgcacctgtattcccagttacttgggaggctgaggcaggagaatagcttgaacctgggaagcagaggttgcggtgagccgagattgcgccgttgcattccagcctgggcaacaagaacaaaactccgtctcaaaaaaaaaaccaaaaaaaactgaagtacatgtgcaggacatgcaggtttgtcacataggtaaatgtgtgccacggtggtttgctgcacctatcaactcatcacctaggtattaagcccagcatgcattagctatttttcctaatgttctctctccccccgcccccgcaataggccccagtgtgtgttgttcccttccctgtgtctacatgttctcattgttcagctcccacttataagtgataacatgtggtgtttggttctgtgttcctgcattagtttgctgaggataatggcttccagctcagtccatgtccctgcaaaggacatgatctcatttctttttatggctgcatggtattccacgttgtatatgtaccacattttctttatccagtctatcattgatgggcatttgggttgattccatgtctttgctattgtgaatagtgctgtagtgaacatacatgtgcatatatctttataatagaatgatttatattcctttgggtatataccctttaatgagattgctagttcaaatggtacttctggttctagatctttgaggaattgccacactgtcttccccaacggtttaattaatttgcattcctgccagtagtgtaaaagtgtttctatttctcccccatttagcaaatggtgctgggagaagtggctagccatacgcagaaaactgaaactggaccccttccttacaccttatacaaaaatcaactcaaggtggattaaagactttaaagtgatcttttaaaagcagaatccaattctgttatcttccttcttaaagtcctccaacagcttcccaaagttctcagcataaaaccctacctcctaacaaggacctgcagtgatctggccctgctgcctcccgacttcacctctgcccctctcctcgtcacttactctgagtttccctgtcctggctttgcaccagttctgtggactccgcgacattccccctgcctcaggctgcctgatccttcttccttcaaatctttcaaatctggcttctccttgacattcaggtctcagccaaaatgccaggtctgccttcccacccagttactcactaccatatcactggattttaattctctatgtagaagctcttattattgtcatttatttatgtatttatttttgagatgggttctggccttgccacctaggctggagtgcagtggcacaatcttgactcactgcagcctccacctcctgggctcaggtgatcctcccacttcagcctccctagtagctgggactacaggtgcgcactaccatgcctggctaatttttgtattttttgtagagttagggtttcatcatcttacccaggctggtctcaaactcctgagctcaagggatccacttgccttggcctcccaaagtgctgggattacaggcatgagccaccacacctggtggtagctcttattcttaagtagcatttcctcgttgctatctgtttgtctgtattcccccatcaggatataagcccaaggaaagtatagctcttgtctgcctccttcattgctggaatccaattattttactgtcctagtaacacttaccaggtcatttttttcgaattaatatatatctttcaaagacacaatgaggccatatcatatccattgttttttctcctcccactttcactttataataaatgttggtgttctctctctcctgattcttttttaacacctacatagtttccatcaaatggaattaccataatttaatcgaccagtccaccataatgcatatttcagctgcctccagtcttttgctaagcacagttaatttcactattgttgggaggggtgtgaaaaccagacttggagaggaggagaggagagagagatgagatggagcaaatgatctaattgcagaacaatgcatcatctcacccttcaatgctgggggcagggattgtttagagcagccgtgtccaaaagaaatgttagaaatgatggaaatgttttctacctgctttgtccggtgcagtagccactagccacatgtagcttttgagcatttaaatcatggatgtaatggctgatgagaagaatattcaattttgtcttgctttaattaaaatgttaatacccgtaaagaacagcatagatttagacaaagggatttatactgatcattaaagaatgttcctgtttacttccctccccataacccagtcacagtggcatacaattcagggatatggggagaggagtgaacaggaatagagaatgttcattatttagacacagaaggtcaagagagaagctgtatgctgagggaaaataaatcccaagcagacccttaaagcaggctctcttacaagttttctcttgacatctgtggacaggtagtgtagaacaggaatcagcaaatttgttccacaaagagtcagatagtaaatatttcagcttggggttatgccaactctgtcacaactaaccctgctattgtcaggcaaaagaagccacagacaatatgtatataaatgagtaggcatgactgtggtccaaggaaactttatttaccaaaacaagatgagggctggatttggccattggttggcccatagttcttctagaacccctgttctagaagaacctggctagagctgcccagttcagaccaccaggcaatcttcctgagaacaaagggagaaccatgccctagccataacccaggaattcttgagttttacacacccagatgggctaaaagacagcatggataacccagtctcagtgaatcagttactggttcaccacatctgatttgagatttctgctgtgtcttgagacacccgtacccttatagcaggtgtcaaacagactcctgcctcatggccaggtctgtgctggtgcggatgtgatacacaagtcagggttgctgacaatggaagctgtgtcttctatttccctttagacctctgaagtgtaagaacacagtgcatcacacttagagtgtgctcggttggtgtgtgctgaatttttaaccaagtgccgcataacctctctgaacttcaatttccccatctatgaaatgggtataactctagtaccttccttgtagggttgttgtgaggaccgcatgagttaatgcacatggggagctggtacctggaccataggaaacgctccgtgcatggtgctgatgcacatggagtgctggtgatagcaacctaaagttcgatggttctgggagcttcaagggcgctcagacttgagttcagcctttaaggatacatggagagaagacggcactgggtcctaggagagtgaaggtacagagaagctgagccagagcaggttcaaggtgaaaggagacggggaaacagagtttgggccatgtgccttcatgaagtaggaaatttactagagacaatacgaattcatgccaagagggtgataccagtctttcccactgatgccatgccccaccccttgcagacccctcagcagaccttgtctgctgtgaccatcatcacacttgggcagtatccctctttgagaaatgaggagacaggcccagagaggagaagtgacttgtccaagaccacacagctggtacaaggggagcaggaccatcatccagggccatttggaattcagtccctgctgcccacatcatgttgtccattgtcctcacccacagaaaacctgcctttgcactacagaggtcccttgggggttacttggctcaatctctgagagctgcattacccccaaacagatcccgtgaccataggggaaccatattcctcccaggccagatcctgtgtcatgggagcttggtttgagaggactgatgcaggtaacacctctcaggtacctcagcagttctgttttgtacctggaggaaaactcctttgcttcttgcaagaaatctgttcttcagtccaaatctccctgtggtcaagctcttgggtcatagtgaggaggaagccatgtaggtctcacccagagagccccggaatcctaactcctagtacatgaagatgtctgcgatccaaagcttggcaagggttggtgggggcggggtgggggtagtatcctctttctggcaccagagtgggatggagcctcatgtagctgtgagagcctgggctccggatctggacaaattgggttagaagcccaatactggcccggtgcggtggctcatgccttaattccagcactttgggcgtgtgaggtgggtggatcacttgaggacaggagttcaagaccagcctggccaatatggtgaaaccccatctctgctaaaaatacaaaaaaaaaaaaaaaaaaattagctgggctttggtggcacatgcctataatcccagctatttgggaggctgaggcagaagaacgagttgaacccatgaggcggaggttgtagtgagccaagatcacgccactgccctgcagcctggtcaacagagcgagactctgtctcaaaaacaaaaaaggagctcagaactttctggactcggtttcttcatctgtgagatggaaccacctgcaaggcttgttgttaatattcacttgtacattcatccaaaatatagttttggaggacacactgtgcgtcagacatttttctaggccttggagacaacattggtaagcaacattgagatagagctcatattctagttggcagacagagaacaaatgaagaaattcagacaccgctagaataagaatctcataaagtggccagtcctgtgtgtggcccctagtaactatcccattaaaagtggtaggtatttttcttgtttgagttatggcaccaaagaatcccttgagacaagggtactgtattagtctgctagggctgctgtcacaaaatatcacagatcgaggggcttaaacaatggaaatgtattttctcacagttctagaggctggaagtccaagatcgaggtgttggcagggttggtttctcctgaggcctctctctgtgtcttgcagatggccgtcctcttgctgtgtccttacatggcggcttctatacatccctggtgtgttgtcctcttcttaaaaagacaccaatcctattggattggggctctcccttatgatgtcatttaagcttagtcacctctttaaaggttccatctctaaatacagccacattctgaagtcctaggggttaggacttcaacataggaacttgagggggacaaaattcagcccataacatgcattgatggtgagaaccaagagaatgtcttaagaccaaaaacgcagtgtggggagaaggggcattttggccaagtattccttgcacaccttttctctggatgcctttgatgatgctgttgtatgctcccttcttcaaggaaggcttcctgcttcccaggcctggcatcatcaccttatcccgatgatggacacccttctccacttgtcagtgtcattctcagactttgtgtgtttgagaattcaagtcatagcatttgtacactatgacttatttatcccttccactattgatggtcactgagatgttcccagtgtttgtgtggcccttatgaataacgctgccatgaacattcttacaaaggtctttttttgcagacatgggccctcattttggttagatacaggcctgggagtaaaatcgttgggtcagagcttactttcagctttagtagctactgccaagtcatttttcaaaaacggttgtaccaatttacactcccaccaggattttaggagagttctgtttgccttatatctttgccaatatttgtaactgccagtctatttttagccatttgggtgggatctatactatagtttacttaacatttttttagccaacatctcctccccctcgtttgtcttcttattcttccttttctcttcctttttctcctttgtcttcctttttctcatccttctttctcttcctcctccccttctttttctccttcttagtatcttttgcatatagaaaataattactatgaaattatagatttgacgtgcaaaggctatttcttgaattttattaaaatgcaaaaagatgcatccatgtcttctctaaaaggactgcgtattcctccacacttggggaaatgcagcttgtgctatttcacaggctcatcatgccccttttttttgccaggacgctggttgattaatgccatgcttggggagtgctccagccagaaatgagggctatcgcctgtggccaataacagagcagattctcaataaacatccccttggtgttacacttaatggggctttgcttttccaaactgctccctttcctgggctctgagcagctgagccgagagctcgtaagctctgctgccccagaacattgtgcattctttgattttgaaaagtctttcctgaaggcctcctcttgggtcattggatcagcccaagagcaaaggatttaaaagggccaatttgatagggacagctcatagccctgtgtaagaccactgggcatttttcctgtttggggaaatggttactggattagcattttgctgtacagggcggtctgcaagaatgtgtgctcttgcctgtcctcaaagcaggcttgtgaggagcttgtctgttcccagccctgccatttcctcccaattggctgggccagatgctccagacacagttaatgagatgctgagggatttggccgggtaaaggcttctgagttcaaggggacacaacccacacgctcgaggaggctgaggccatgtgagccagcggctctgtttcactcagaccccagcacactttgggaagaggaaatggtgcaaagactaaacatcagtttggggcttcccttgacgatctctgtgatgaaggctgggagaggtgggctggcaaaagggtatcgattcagttttctgaatgtgcaaccacctgccagacctaggccaagggtggccgggggctgacaaaagaaattgtcagaaagaaaaagaaattgtatttctgtccttgaagagcccttacttgggaattaactgggaagatgctgctaaaccagccctcctgatttgcagatggagactgggtcactttcctttagaattccccacaaatagaagatgtcacatagtccttgcttgaggtgggatacatgggctagggtgagcatctgtagacccagcttctgggtccctgtcttatgctagatggtgaggatacaggccctttttgtgtgatgggcatgggcccttggggagacagacattcctctggtaaccacataagtaaatgcagaattccagctgggatgcattctaagaaggaaagcaggtggtgctgggagcaggtgtaaccaggagatctgactggtttgggagttaaggatggcatctctaaggaagtggtaccttaatgatgagtatgataccactaacaagcacaatggggaataatgtcccaggcagcaggaacagcatgtgcaaaggccctgaggtagagaatttagtgtggtcaaggaccagaaagatgacccgaacagctagagtccaagatgacacaagaagttggagggtaggtgtggagggtcctaggaagcttttatagaccacaagaagagagaacaactggaaacctttgtggggttttaagaagaggagtgacatgatacaatgtatactttttaaagcctgcctttgactgctgggtagagaatacattgtaaagaatccaaagtgggatccaattactcaaccataaaaagtcatttagtggtgatccatgctagaacatggatgaccctcaaaaacattgtactgagtgaagaagccagacacaaaaggccacatcttgtaggattccatttatatgtaatgtccagaataggcaaatccatagagcgagaaagctgattggtggttgcaggggctggaggaaaggggaaatgggagtgactaatgcgtaagggatttccttttgaagtggtgagcatttggaactagatagaggttgtgatcttccaatatgaatgaacttaatgctacagagttattcaatttaaaatggtgaattttacgttctgtgaatttcactttagtataacaaaaaagcaaaaatggaaccaaatgcaagtgagtctgcgattccagcgaggaggcagcggcagcccaggtgagaagaaggtggtggcttggaccagaacattggggctagagatggagagtaatgaactcattcaaagacaatgtaagatttctcgggatccttttagttttgatactgtatgtaaattgggcatcagaaaagtgggaagagttttcccagattccaacactggaagagtcctttgctgtacttgggaaacatgcattttcctaagcataggtgatggcctggagctgagtgtctttccctaacacagatgtgcagccttggcttagcccagcccctctgcacagcttaccttgtcagggagccctgacttgctggcccatccagaaagcaccatggtacacccagggctgatatagccccagaggatttggcttccctttctaatgttttgtgccacctaattttgttgattttctctgaattggccttatttccagatgagacatctgtgtgacagatatctaatatcctacaaagatcacgggaaagaatgttctttttaattgcatctgtgagatatattgcaaaatattcactaaatcttaagtacacagtcacagtcattagaaacagtcatttgtgtctgttttttccccctgaccatgccttggtaatgagggtggatggaaaggtgaatcccacatcttgtccatgaaggcttccttgatgggtaggaagcaatatgggatttctttccaccctactctaatcaaatagccatgtattctctcgttttcttttactcccattctctcttctgcccttctttctctccatcttttcatcccaccattcttcccttttccatccttccttcctctttccatctgtccatccttccattctcccattcttctccattcctttatccgttcttctgtcttcccattctcacttttattccatccatttatcctttaattctttcatcttcctcccccatcctcccttccttttatctgtgttcccatcctcccatcctctctgtccttcatcaattccatccttccaatttttcacccttccttccttctttccattcttttatccatccatcttttcatctatccttctgtccaactaacccttatttagatataccccttctcccctccatctgtggccatggttggtaaaacagattgactctgaggtcattgagctcctgctaaacttgtgctgggtcagacttggttcttcttgccagaggatctggtcttgtcacttagctcagtgcctcaaggctcctgtcagggttttggagatgacggtggttatctatcaccagagggttttgctgtgtcctcttcactcactaagggccatggtggattgaaagtttgttggatatcaccaggcgcagtggcccacgcctgtaatcccagcactttgggaggccgaggccaagatgggcagatcacaaggtcaggagttcaagaccagtctggccaacatagtgaaaccccgtctctattaaaaacacaaaaattagccgggcatggtggcacacgcccatagtcccagctacttgggaggctgaggcaggagaatcccttgaaccctggaggcagaggttgtggtgggccgagatcgtaccactgcactccagcctgggtgacagagcaagactcagtctcaaaaaaaaaaaagtttgttggatatttcgggtgaaaattgcagcttggcttcaatgttggcttcttcaagtctacttctatagctatacagacatctgatttgacctggtcatagtgactttaatagcaggtgacatcacctgaaccctcactctgtgctgggtcccctgccaagcttgttatctcatagaattctcacaatagccttctgagattggtgttagtattctccccattgcccagatgaggaaaccgagatcactttctcaaggtcacaatcaggacttaagtcccagtctctctgaccccaaagcctatgagtttaaccactaaattacactgcatctgtgggatatactgcaaaatattcactaaatcttaagtacacagtcacagtcattaggaacagtcatttgtgtccgtgtatggatgtttctttgaatcttgaacattgagcatttgcgtgggatgaaatggcacccctccccccaccgccttgctttcctttcttctctgaccatgggcaggaaagagtccgccagtatgtgctgctataactggaggctccttgctggtcctcgccgtgggcccctggggagataagcagagttggcgttccaggcgctaaggactttgcaggcatgcttagactccctcaagccagcgagcagcaggcctccttcacagtggggcttttaacctgcttgtgtgggatgcccccaggcttaaaccaatagacttttctgaactctccttccaggattctgaaaatctgcaaggaggctgtgctctggccacaagagggcaccccactcctgggcaggcaggatgggagtttgggggaggtgggtgggaggagctgagagattccttttggatgcagctttgaaccaagcgctcttaagcgcactccttgggaagggaagaaatgttttcaagcccactgaaaagtttcatttcattcaactagtactaagctaagggatgaaggatccaacagggtaaaccacatggttcctgacctcaaggagcctacagtcatgtgtggaaggcaaagaattagaagggaatgtgatgtgtgccagagtcttaatccagaacagtcatttggtaagcatttaatgagcacctactatgtgccaggctttgtgctggttgccaaggataggaaaatgaacagcacagagtcattgccctcaaagaccacagtctacttggaagacagcaaatctgaaaaaataggaaactgttgccatcaatctgtctgtctctctgccgtctgtctgtctatctatctatctatctatctaatgatcaatcaatcgagagagagagaactgagaaggaacacccaacccagtctaggagggaagagggagtattagggaatgctttctggaggaagaacacccaacccatgccgaaatgaattaggatatcaaggaagacttcctggaggagaggacatcagagccaagtcataaaagacaagtagggtttagccaggcaaagcaacagagggtattccaggtggtggagacagcatatacaaagagtgagaaggccccagggccagaccaaggtgtgtgtgtgggtagatattgggtaccatgttaaggacattgggtcttttccagcatgtgatggaaaagcaggttctaagagagtgaggtgagggaatgataagttaccccgactctgtgggtaggagagggcattatacacgtggtagcatttgaactggaccatggagtatgtgtaggggttcaccaggtggaggaggaagagaaacgatagaaacactctgtgaggggcagctttgccgttccgtgggggccactgaacagggactctcctgggtccctgccctgtctccttcatctattacagcatttttctgtttagttactccagagcaaaagggatcagtgctagacacaggggggcaaagggaaatatctgcgtggggtttctgggtggttctggtgaaagggttccaagaaagaggtggatgaagcaaaagtgaagatttagggctcagttcttggccaccccagtgcctctgacctgagcatgtcccaaatcgaacttctcaggatagtggcctcggggtgggtgatgatgtagggttgggactgacatgcagggtctggtgtgggtgcagttgagagatgcaccctggtgccgtactgcctggtttcagggctggcaccaccttcaccacatcccttatcttctcattgctttggtgtcctcatcattggagagaagataataacagcatctcccacctaaggttaccatggcgcttaagtgaggtcatacatgaaaagcacttgatacagtccctaggacatggttggcactcaaatcaaagcagtggtaacagtggctgttgttgctgttattattatgatgaagcctcctgtttgataaagttgaaaaattttaaatgtccatgttttatgcttataatttccgagctgttttctctccatttcagatcaaagcttaatcagcaccttgctggaatccttgtttttagtgtctcctttctatctctttctcagtatgagagggcctgttggaaatggaataatttcgcctcctaataatctgttggcaaggaagatgcctagaaaaaaaagaaacaattcaaaaagaatcttaaataccctatttttttttatttcagcaacagactgtgaataattgctaagcccctcactttctttatcatttttaaattttattattatcattattattattttagagacagggtctcactatgtcacccaggctggagtgcagtggtacaaccgtagctcactacagcctcaaactcctggtctctagtgatcctcccacctcagcctcctgagtagctgggactgcaggcacatgcctccaaacccggctaatgttttaattttctatggagacagggtcttgctatgttgcccaggctggctgcaaactcctggcctcaagttattctcccaccttggcccccgaaagtgctgggattatagagatgagacactgcactcagccctctttttttttttaattttagcaatgtattttacttaacccaacatttgatgcatacaaaaatattgttaggtattgtccattattattatttttcattctaagcctatttcagtcaagcctcaccacaattcaagtgctcatgtggacgagtagctctgttattggacagggtagctctatactaagaaatggccaggatgtgacagatccattcttgagggcgtagttattctcagccttcagtatacattgcactttttttgatagtatcaaattttgccataagcttaactctgatggatacttgcactcataacacattgctattaattaattgtttaaatatcatactattacccgtttcagtgagttacctatacatttccttacctttatgattctgtgtaagagacagtccctggctttattgcacaattgttgccatgaatgtaccatgttgtaggcagaaggcagatgctcacccactggtggggtgagaccaatgcccgtgtgtaggattgagattagacatcacccctttctcttctcttgaatgaatctataactggccatggatcaaatgctgtgagctgaggggtccctggaagagctcttctttaccttccttccttttaccatttagagatcattcaacaaatatttaaattcctgctctatgtgactcgttttgctgggcacagagtgtacaaagaataccattcaatctcctgggtcttgaagagtccccaagaggagaaccaaactttcctgaagcttctgcttggtttcagctgcagattctttcttctgaaggaactatcagacagatatccataatataataatgataattcatgtttatactttgtattaattcacttacgggcatttttaaatcctctccacaattctccaaaggactcttttgtaggcaagagaactgaggcttgagaaatttaatggactcacccgggggtggtgagaccagttatttgaatctggggagtctggccccagaatagtgtaattcctgcaagctgcacctgctcttctccagcaatgctgctatggtggacacagcgatgaagggtgggggcacccagggtcccttgtctatatcactcttctgatctctggcagctgcctgtgaggctgtgaggcaccccatcagatccagcctatgatctggtggagcaccctccctcctgaactcctaaggtgggcaccatctgaggctcctggtaggcaccggaccaagagctagacagagccgtgggtgggctgggaaggaggagcccggcaccagaagtcctcagcaagaggaagcatttccagaagaggcactgtgatcctaccgaaggcttagtctacttagatctcttgaaagtcatcaggcttaacatctacagaaatgcactgattattgttacatggaggaagggcagtggatttggggattaaacacgtagatggtgaatgccaccttgacacagatctggactcacttgaggacagcctgggatttgctgtttttgtcaaatggccaaagagcagcttggccacgggttgggggcttggagctctggagactcgagatgtttaggcaaaagttgcgggattggagttggaagctgaacttgacactggctctctagagcttctctagggagctgggcaaaaaagaatggctgaagtgtttgcttgtgctccatggtagaatgagcttcttagagggacctaggggtgagagggtaaaccctttttgcccagcccttgtgtctctacctaaaagcctgtgggctcttctaatttctccctgtgggttttggacccctcatgggaaacacaaggctgggcctccctgctgtaactttgtgcacctatggatatatttccttttcctctttttctgtctccctttcagagccaagaagaagagcaaacccttgaacctcaagatccacagcagcgtaggcagctgcgagaacatcccctctcagcagcgctccccgctgctgtccgagcgctccctccgctccttctttgtgggacacgcacctttcctgccttccacccctcctgttcacactgaggccaacttctctgcaagtaagtcaccctgccgggctgcactgggaacgcttgccatgccacctccttctccccagcacctgctgtcctctgtgccaggtgcaaactctctcttctttatctcaagggcttgtgaaatgctcactgtagagcttcacccatcatctgcccacagcccccccatctgcctatgccactcatgcccatttggatggttttggaagggggcataactgacgctggggaggttgactgggtgttgtcgttggtccccagttcctgctctttcccctgaagttgtgaaggaaagatagagaaaagcaagcaggcattcagggaggcacccgccctctctctccctcttcccggctgcctctcagctgcctgattacaggatttttcttggctgctgtggctaaggcatctatgattaagttttgtatttttttccccactcaggtcaatatatataacctttacatctcaaagatgtatttgggttcaaatggggttgagcatggcctgaggtggtttactttctgctcttacgaatttctgctggagacagggtggttattacttggagcggaaatggaactttttggtgatggagggctggtttaatcttctctacccagaggcccgatttgctgaacaggcacagatgtggtcagaggggcacccccactgaataaagcccagccagtcctccagccaagacagcaacttttattgattggttgctcaagagaaggaagggctctgagaatgtagaagaaataacccctggcccttaattcagccacaggctgtgcacgttgtgttgctgctctgagaaatgatgagacatgttcactgagccctgatacatgctaatcactcacaggcagggccccatttagttcttgcaaacaatccctcatgcagatggattattcccattgtacagaaggggaaactgaggcccagggatgtcaaagaacttgctcaaagtcacacaggtgttgagtatttgagctgggatttgaatttggttctttctaacacatcacacatcatttgataaccatgaccgctcaaatactcagcagaatgcctttctctaaatatggggtttccttcattacttttatctaagggttcttacactttgagaatttgacaagatctattaattctgtgcctggaaaaaaaggcaggtacatgtaatatccaacatcccgctagatggttaggctggggcccgaatagtgagcttggtttatagcccatgggtgtttatggtgcatccgtggtaggaatcagctgagggtatggactgatgaaccatgtggacatcagttaggagtcggtccagagactgccttgtcttggtgcccaggttaggcaggctctaaatcaagcaaactaaaatagtaccctcgactcccaggtccataccagaaggccaatttattaatttgtccagagaaatcactgccagagagagcacccttcatgacggtgggcctgcatggtagtcaaagagactggctgcatgagcgtggatgaagaaaagcgtgatagtgacaagtccagtgtgtagcaacagccaggtgaggcagatgtcacgaccaggagcagatgcctgggtttgaaccccagttattctacttttaagcaattatgtgtgacctcaagtgagttcaaagcctctgaacctgtttcctcatctgtaaaatggggacaataagaggttcatcttgtagacagttgtgaggattagatgagctcatgcatgccaagccttctgcacagttcctggcacacagtaggtgcataataaatggtggcttttatgatgatgttttattcttgaagcatttacagcctgtgggctgatggttaatttggggcttctgtggctaaatgccttgcagtttacttcccctccccacttccccatggcccgaagagtgcttggcatttaccttggcatgactctgggtgactgcctctaacagccatctgtccttggtcatcgccatcctatgagtgaatgtcagccgggccccctccaggggttggccactgctctgcactttaattttggccagagtaaaaacatctccttcctgctttaaaaaaaaagacaacaaaacacagatttaaacatttgagcccccgtccctaccaaagagtttttgaggattcatcatggcttctaactttttgttcccgccctggtctccacctaagaggaaaagcgtttctgcttgcctgtggacaggagcaaagtccttaattaaaaggtggctcccagcagtaagaggcaccaggagcacaactgccccttggacagtcttggttcttcaaaaaagttgctctctgagctcccggaaagaagaaagacagcatttgagtctcagtggaagaatgagtgagtgtgtaacccaaatagctgagacctcagggaccagttccctatctgttgattctaacaagtaacagaaacagaggcagcctggtgtggggcaggcaggttcgtttgggaaacgagaagctctctgttggaatctcagtgttgccgccggttgcctttgtggcctctgtctctgcctggtgtgtcagctgcactatttcagttaagactcaccccagtctgtgaggcaggtgctagaattcccatgttacagatcaagaaactgaggctcagaatggtgcatgaatttgtccatggggtcccttctgaatccagatccaatctagcctgcattgtatcacttcaatgcggcaagttccttcctctatctgggtctcagtttccccaggggtatgcactccctgagggtccatttcagtgactctgaggtctagccactgagttttcctaggcaaatcttttgatgcaattagaatgctggttttggggactctgggtggggcttggggttgggagaacacagctaccaggtgccgactcctccttgtttgtaatagttcccattcccatgccagtgaattccagaagagaactccctgcttttgggccctggtggcagccttcctcctgctgagccagccaagggggcccctggggctgcatccctgccaggctcagtctgtctgcctgtttgtaactgtcggctctggctctggtctgcactgtgaagggtggtgacacgtcatcttgttaccccatgatggtaacgcctggggacagcattaggcagatctggctgtagtgtggccaagcctcacaacctcagggtgcccagccaccttgagtgggctgcgagaaggacatcaccttcttggggcttaccctactcccctggcctgggagtggtgagtggggaaagggagggaggggaatggcaggagccttcgctcatggaggaatctgtctccaaggttcaccagcccttggggttcatagcctcactcaggtagggctagaatgaaagacgtcagacgcttctgttcaccatgggagatattgactcaaatgaacctgcttcccagagaaatagagagcagtggacttatctctccacccttgctgtatttattctgtgttgcatttgggtgggccaccatgctctggtggtttgcttaggtgctcttcaccagtggatcatctttaccccaacaacctgcaagctcgtgggctccttgtaggctatctctgatcccagctgatggaggtcaggctttcttaaatcccctaaagaaaggctacttcacaatgaaagagtgccacctagatggaaggaataattgtcatcattcattaccagctggtagaagtgacttcgggtttaaagcaactaactggatgctgttaagtcgctggacaaattacttaacctcttgagtctattttctacccagcaacaatgcagtgaggatacaatgagaaatgcatgtaaattccctagcgtggggactggtacttagagcactgagtctcaataaagggtggctttgggagccattgctgtatgttacatgatgaagtggcttgcaacaatgatgaaaaccatgttaataatagcaatcggcatgtattgtgttgacaatgctccaggcattgcacaaagcagttcacttttattatttcatttaaactccatcatcctctataaggtaggtactactattattcccattttacagattaagaaactggggttgagagagtttaagcagttggcccaaggtcacaaggtcaggaaagaggtgaagtttgccatccttttgaatcctccactctgcagtgctcggttgtgaaattgcaatgtcatcttcattaaaacttgcttgctcattaggtagggaactgaacatgctcacgttttctctccaatgcccttgcatcacggggggagtgtgttgtgggtgacagccttgctcaaaggacgcctctttgtcagtgtgctgtgctcacttagaaagcagcacccacattgactaaccatttgctgctccacctagactctgttgttattattctagggatctgtcgtcccaggttgtagccatccccgtaggggccaggcagttgcagaaagtagccaaaattgcaagctgcaggaagctcctgcgactcattcatcctggacatctctggtggaagatgaggaatgacatagtaattttgccacctgcagttttctgggtgtttctttattagctgcccatgactcacttagaatgctggttttggaaactctgggtggggcttggggttgggagaacacagctaccaggtgcagcagcttcagggcagcagttaccaaggggaacaagtgactgatggttccagaacttccccatcttggtcgtaatgacaccagctggagttacccacaaggcctgggtcttatggaatattgtccttcatgaggtgtcttgaaagacggcagcccctctgctcatccctactctaagcaactcctgctctttgtcctggggacaagctaagagagagttgcccctcttttgatagcctggccttgcgtgtaccttgaggctgagtcagaagcctggtttgtcgaggaaggcagcaggtagcaataaagactgatggagcagaactgcctactcccaagaaagcggccgctggaagggttataaagagactcaggatgggggtgattatataatggggtttaatgaggcttaaggccaaggttcattactccccagaagagagggaggagaggctcgtgtcttgacagaagtttgctggctgaaccacagtcttgtctcagaattggaagatattttgagcagtttgggtttgactggactcagtggtgccaattccaaggggaaagtagatatcctattggagttacccaaaggacttcgttcccccaaaatgagctggggtcggtgctggtatctcctcttcccctggggactcagcagacacaggaggttccacgttgcctggcatcttttagaaactcaggccccagcagctttttaatgggtactgaccacctgctacatgccaggcaggatgtagatgatttgcaggcattaaaatatataaacctggaaataaacaaaatgctacagaacagttcctaaagaaaagcactgatctcttgcactattcctccccaatcctgcttcccagaagcaaccagcttaactccttctgcctagttattttggtgatcacaaccacaatttaaaccaggttctaccgggggttctccaagtgtgttccagaccaccatcaccagcagcagcagcatcccaaagcttgttagaaatgcacattcttgctcttcccctccagccctattgaatcagaagttctggggagaggtccagcaatctgagttttcacaagctctccagggagttctgcaggctggcatttcagaatccccgggttatatggcagttttttttaaagctttcattttgaagtaatttcaaatttacagaaacgttgcaagaacaacacaggggacttccaggtccctctttacttagattcactggtttttaacattttcctgcatttgcttttttctctccctctttctttctttctctctctctaatttttgtgaaccatttgggactaggctgcatactctcttacataaccatgtagagttaccaatttcagtaaacttgacattgagtcagtactttcatctcaccagattccaatttcagcaattgccccaatagtatcctttagagcaattttttttttttctggtacaggatcgaatctgaggtcacatattgtgtttagctgttatgcaagctagaacagtttctcagccttttttgttgttgtgtatgactttggcctctttgaagaggaggggtcagttactttatagaacatctctcaattcaagtctgcccgatgtttcctcctggctggactcaggctagatgtccttggcaggatgcctacattaagtggcgttgaatctttcttagtatatcacatctttatagacaactccactgtgtgggatcaggagacttaaggtccttctgtgccctgcacacttgccccttggatttccaggaagccaggagcccagccctcagccttcctggtgcttctctgtgatgggatgggagttattccaggtgtaagttgctctcaaagtgcaagaaactgacacagaagataaagtctggatgtaagcagttggccttaagggactgcacgtgtgtcaaattgtcatgattcatttgcagatgtatctattaaatatctttatgtttcaaaggagttttcaacctcttgtgttgtgtgttcatttccacccctgtttaatgaggtagattcggccttgtcatgggttgaattgtggcctcaaaaagatgtgcccaaatcctaccccacacacctgtggatgtgccttatttggaaatagggtgttggcaggtgtgatcaagttaaaatgaggtcattaggatgggccctagtccagtatgactggtgtcctcataagaagagggaaatttggacagagataccaggatggcaccaggtaaagatagggacagagattggactgatgagtctacaagccaaggaacaccaaggattgccagagccaccagaagctggaagagactcatgaggacatgctctcctcagagcctccagaaagaaccaaccctgctttgaaaatcaagaacctccttaatcttggacttctggcctctagaacagtgagagaataaacctgtcttgttttaagccaccagtttttggtattttattatagcagccctaggaaaccaacgcagacctcctcctcattttccaaataagaataaggaaaggcagtaccagggccaatctgtataatcatggcaagtcaatacctattcaaagtctcagtgtcaccttaaatgccagctggaacaggacttttcctctgagatacctactgggttctgagaagtacctgaaaagggtgtagcagcctgatgtgggggagagaagaaagaggtgaggcaggggcagctgctctccagccccagcaggtgtggctgcgtggagatgtgggcccagcactgtgctgccagattgtttgatttgttcagaagttggagatcctgacttttacaagcactctcccattttaaaaatgttagcaaccaattatacatcctttgacactgtataagctcatgttggataactccacagatttgcgggttgcattttgtttgggggctgccaatttttaatctctgttctaggatagatgtcagagctggaaagggcctcagaaatcactgagtccagccccttgttttacagatggggaaactgaggctagagagtaggaaggacttgcccagggctatagagctggggcttgaacctgagtctcctgatgccaaccaatggctctctccattatatcaagagggttgcagaacagcagtctctgctgccactcaaagtgcttagcaacaaggtggtggaagttcaaaggaagttagcgtgtctttgtttaaatggtgacactttttgtctgtatggagggctgctgaagcatgcggacgtgagctgtatgtgtgtgtgcatgtgtgggtgtgtatgttccatgagaggcaacttctgggttcttatcatcagtcttctcttgtccctgcctacacattttgtacttcttgccctagcaaaaacagtttgggctcagcatgcagtagacaacctcagcccttttgttatgattgctttcaccaggagttgtggtgaccaaaattggtaggtaagtggttggcgttagaaagcaagggggccatttgtgtctgttggagttaagtcctgatcctcggtcaggtacatgctgtcagagtgggcaatcccattccccctcatcaggacctgtgtctgatcgatcctgcctttgtcccagtaacccctctcttgagcatcagctgatttcaaaacatcagctgatttctatctgcgatagaactgtacggtgtacacaaggcattcgtattccttattagtgcccctgcatccccattctgtggatgagaaaactgacgtaccaagagaggaaaattcctggctggcagttacagagtgcatcagaggcaagactaaaaaccataacgccttcagacaccaggttgcacgatctttctgcacatgacttggcctgacctcatttctatgaagtggtagcgctgcaggggggttgggtttgtttcaaccaaatttaccctcctccccaacaagcctggtcctcttctggcagcctcgtcttgcccatctatccagctgggtaagcctatatttaggtgtgaactttgacccttcttttccatgatgccctatcttccatgtcttgttgagtgaggcttctaaatcaggggtcagcaacctttttctgtaaaaggccagatagtaaatatttccaattttgcaggctgtatgatttctgtgacaactactcaactctgccattgtaacacaaagcatccagagacaataccaaaacaaatggatgtggctgtgtttcagtagaacttgacttacaatagcaggcggagggccagatttggttcatgggatgtagactgtgacctctgtccttccactttttttcatctcctcctccatcatcaccacccttgtccaaactatgcaatagtttccaaatggatcgtcctgtatccactttgacccaaatccaatccattgatgtaatcttcccaaagtgaaaatctggctctcaaccccaattaagataagattctaccacagtctcccactgttcatagtctacagcccagatccttaacgtgtcatgccagaccctggctggctcctgtgctctctctagcttcatttttctctctctgccccgtcacatgaattccttcactgaactatgctctctcttgccatgaactcttaggctaatggacacacgctcattattatcacttccatctgaattaatgtttccttgggaaagcattgcctgacattctaagttagatcagttacaccttttctcatctctgtacttttctttagaagcacttagcacaatgtgcaggtatatgtgtacttatatgagtatttgtttcatgcctcattcctctaatatcagttccatgaaggcagtgactacgtcagtcttgttcatcactgtgcctggcatggagctagcacacacaaaatagttttgaatagatagcaacgaacatttttgagcattcactttgtgtccagcactgtgaacctttagctactcaggacctagatggcaaaggacaaagaattctacttgttgccctccagagctgcagggctggctgggcttggcttcacccaggcaggaactgaagtctctggatttggatgcagtctttggatttatggatgtttctcctgcttaactgactagggaagcaagtgtccaagaaaaactgcccccgaaaccattttgttgattgaaaaataagcagctctttatcactgcatggtgatgttggtgattgggattcatggttggttacaagtgacaggtaacccaacctaagtgttttgttttgtttttaaatataaaggtaatttattgacacatgtaactagaaggtccataggctatgtagccttcaggtatggctggatctaagggctctgttcatgttgtgacttagtctctatctctcagccctgctgtttttaggtcggcttcacttttatgctctatttggtgacaagatggccccagcagtctcccctattctagtccatagcggcagagtaagattgtttagatctgagattcactctgaatccacaggcttgactgtgtactcatctctgaaccaatcagcagagccagagaaatgggatggatacttactggctttatttgggccatgatctaagctatgggcttagaaatggagagtttcgcagtattagtcaggattctcttagagggatagaactaataggatatatatatatatatatatatatatcctattatatatatatatcctattatatatatatatatatatcctattatatatatgtatacacacacacacaaaggggagtttattaagtattaacttacatgatcacaaggtcctacaataggctgtctgcaagctgaggagcaaggagagccagtctgagtcccagaactgaagaacttagagtctaatattcaagggcaggaagatccagcaagggagaaagatgtaggctgggaggctaggcccatctctccttttccatgtttttctacctgctttatattcactggaagctgattagattgtacccaccagattaagggtggatctgccttccctagcccgctgactcaaacgttaattttttagattcagtttcactcttgttgcccaggctggagtgcaatggcacgatctcggctaaccacagcctccacctcctgggttcaagtgattctcctgcctcagcctcctgagtagctgggattacaggcatgtgccaccacgcccagctaattttgtatttttagtagaggtttagtggggtttctccatgttggtcaggcttgtctcgaactcccaacctcaggtgatccacccacctcggcctcccaaagtgctgagattacaggcgtgagccaccatgcctggccacaactatccttcatataaccagaaatgcaccaacctctaactcaaatactattatataaagttaacaatgcttaaatgctgatacgcagacaataaatcttatgtcacatgataaaggaaaaggaaataaaatgaagatattttcttagtacaagggtatacgtacacaaacatgtgtttaacaaaagaaggaggaaatactcatgacagttatagtcctcattgctgcagctggtcacgtggtcatagctagtattgatgactaccttctactacccattctgtattccgtttgccttcagcaggcacctcagcaagtcgtggtttttttcctgctggagtgacacaaaccttcattcctgaagggtccgggtcatttgtagtcctgcctggattgggctgttgtagtttcccattgatcttaatcacagtgcatggtaatactcagagatgccctaatggatctcctgtattccatgcgtactcttccttacctccattgtggagtagcagactggtttcatcttgatagtctgggtcattcaccccagccagcattgtaactcccttcttagcctgttgacttaaaggtaggaggagctcaaagtgtccaggtggtaattttaacttccagtttagtggaatcgttgtgtctcctggtggcagcgttcctccctctggaactaagacctctaggccagcagaacgtaatgtcgtgggatcaggaagcaaaaactttgctagtggatcactaggggtgatggtgggtggtgccacttccgccccttgattcctggacctgtgaattctggctatgggagaaagagtaccatatattggatgccgattcagagcatacacggccttctagagaactttgccccagtcctgcagagtattgccacctagttggtgttgtaattgtgacttcaaaaggccattccaccgttctatcaatccagctgcttcaggatgatggggaacatggtaagaccagtgaattccatgagcatgagcccatgccacacttctttagctgtaaagtgagtgccttggtcagaggcaatgctgtgtggaataccatgatggtggtggataagccattccgtgagtccacaggtggtagttttggcagaagcattgtgtgcaggagaggcaaacccatatctggagtaagtgtctattccagtgaggacaaacctctgccctttccatgatggaagaggtccaatataatcaacctgccaccaggtagctggctgatcaccctgaggaatggtgacatatcgagggctcagtgttggtctctgctgctggcaaattgggcactcagcagtggccgtagccaggtcagccttggtgagtggaagtccatgttgctgagccaatgcgtaacctccatccctgccaccgtggccactttgttcatgggcacattgggcgatgacaggggtggctggggaaagaggctgagtggcgtccacagaatgggtcattctatccacttgattattgaactcctcttccactgaggtcacccgttggtgagcactcacatgggatacaaatatcttcacagtttttgaccactcagagggttccatccacatacctcttccccaaatttctttgtcaccaattttccaataatgcttcttccaagtccctgaccatccagccaaaccactggctacagcccacaaatcagtatataatcacacatctggtctttctccttccaggcaaagtccacaaccaggtgcactgctcgaagttctgcccactgggaagatttcccttcaccactgtccttcagggatgtcctagaaaggggctgtagtgctgcagctgtgcactttcgggtggtgcccgcgtattgtgcagaaccatctgtgaaccaggccctggtcttctcttcctgtcaactgatcatagggagctccccatgaggccatcggtgtaggctggggaagagaaggcaggatggcaggagtggagatcatgggcatttgagccacttcctcatgtaacttacttgtgccttcaggacctgctcaagcccaatcccgtatatgccacttccatttgatgatgaaatgctgctgtgcacgactcactttatggctacatgggtcagaaagcacccagttcatgataggcagttcgggtcacataggcagttcaggtcacattgatgacccatagccaaatgtacagtttccaccaaagcttagtaacaggccaagagctgtctcttaaaaggagagtagttatctgcagaagatggcagggccttgctccaaaatcctagaagcctctgctgtgattcacctatgggagcctgccaaagtctccaaacagcatccctgtcggccactgacaccttaaacaccattggatctgctggatcatatggcccaagtggcagagcagcttgcacagcagcctggacctgttgcagagccttctcctgttctggaccccactcaaaactggcagcctttcgggtcacttgataaatgcactggagtaacacacccaaatgaggaatgtgttgcctccaaaatccaaataggcccgctaggcgttgtgcctcttttttgttgtaggaggggccaaatacagcaacttatcctttaccttaaaaggaatatctcgacaggtcccacaccactggacccctagcaattttactgaggtagaagatccctgattttagttggatttatttcccatcctctggcatgcaaatgcctcaccaataagtcccgtgtgtttgctacttcttgctcactggatccaatcaacataatgtcatcatgtaatggaccagtgtgatatcttgcagaagcaaaaagcaatcaaggtctctctccgaataagattatgacacaaagccagagagtttctatacccctgaggtaggacagtgaaggtatattgctggccttgccagctgaaggtaaattgcctctggtgggctttatggacaggaatggagaaaaaggtatttgccaagtcaatggctgcataccaggtagccagagatatgttgatttgctcaagcaatgaaaccacatctggtacaagtacagcagctgcagttggagttaccacttggttaagcttatgataatccactgtcattctccaagatccatctgtcttctgcacagaccaaatgggagagttgaacagggatgtggtgagaatcacctcccctgtgtctttcatgtccttgttggtggcactaatctccacaatccctccagggatgcaatattgtttttgatttactatttttctaggtagaggcagctctaatggcttccatttggcctttcccactaaaatagtcctcatcctaccagtcagggagccaatgtgggggttctgccagatgctgagtatgtctatgccaatcaagcattctggcactggggaaatgaccacaggatgagtccggagacccactggacccactgtacatcagacctgagctaaaactccattaattacctgacctccataagctcctaccttaactggaggaccacagtgatgtttttgggtcccctggaatgtgtcagctcagagtcagtgtccagtagtccctgaaatgtctgatcatttccctttccccagtgcacagttaccccgttaaaaggctggaggtgtccttggggaaggatgggagaaagattcactgcataaattgtctgtaatgtagtggggtccttcctcaagggacccagcctccccttcattcaaagggttctggttctgtaaactggctcaagtctggaaattgactgaggggctgtgattctctgtttttataattcaaattagccttttgtccatcctacctagaaattttccatttgtataatttaagtaggaatgcagtaggcttcctatcaatttcacttctaggaacactgtgattaattagccaatgccagagatctacatgagtcagagtattcttttttaaattattattatttttattttttccataagttattggggtacaggtggtatttggttacatgagtaagttatttagtggtgatttgtgagattttgatgcacatatcacccgagcagtatacactgtaccatatttgtagtcttttcatccctcgcccccctcccacactgcccctgagtccccaaagtccactgtatcattcttatgccgttgcgtcctcatagcttagttcccacatatcaatgagaacatacaatgtttggttttccattcctgagttacttcacttagagtcagagtattctgattgccactttgcctttgctgtccattacagtagctactctcaccttgcctttgacagttgagtgctgccacttggcccttgccaccttgggatccaattattccccttgtatgtaaattttgtagttgagtgactgtggttcctaccattagatctgacatacagagaagagcaattacagggctcttcaaagatgtaggtgctgccctcccaaatctatttcgtaagacattggtcaagggtatatcttctggaccctcccagctgggatgagtaggtctaaagtgactaatctactccaccatcccaatctccctgagcctttggatctcttcctctacattaaaccaagggagatcaggcatttccaactcactcacagtgggccatcttttaatccatatttcggctaaccaagcaaataaactattagaacctttttttaactccccaatatgcaacattaaatgcagagtccctacttagtgggcccaaatcaataaattcagcctgatccaactctgtgttccttcccccattatcccacacccttaatatccattcccatgcctgttctctagattgctgtttatataaattggagaactcaaacagttcttttagagtgtagtgcacctcctcatgggtcacactctcaacctcacctccagggaccctctgggacttgagtgtggttataggtctagaagcaaacaggggtattgggggtggctcctgaggagaatcaacattattttgcctggcaactgcctcagaggaggccatcactgttgcctcaggcagggcagggtttatcccctcagacaaaggtggaaaggctgatggcagcatgggttggggaggggatgttgccatttctggggatggggaagttgttccttctggcaaaaagggtccatcagagtttacaaactcaatgtccccagcttcatcagggtcctcccacaaatccccattccaaatttcagggtctcatttttttctaatcaatgccctcactttaacagtaaacacctggtgaggctgtgcatgcacctttcattgcaggttagccagccactcacatggtaagagcttatgtctgtttttccacaatttcagctctttctctacaggagataagactcactcagggcaatcttagtagatttgaggttcagtatctgtttctgaagctgggagacagaatccctgagttcataatttctttcataattttatttcatcactttgtctactgaacttaggagcagccaaccagcttcattgtgttccttgggtctccaaatatggtcaaaggtattatgtatagcgtcactaaactccttgcctttcataagcagtgaatcaggagtctcaaatgcatttattttgcataattctctaaacagttcatgccaaggactatcagtgttctctatactattagaagtagagtccttagcatttttgggtctaatcatattaagcagccaactccagaaacccccaaatcaatgaaagaactccatccttaatattctattcctctaaaaccactcctggtaccaaaatctatattagtcagggttctcttagagggacagaactaataggagatatatatgagtttattaaatattaacttacacgatcacaaggtcccacaataggctgtctgcaagctgaggagcaaggagagccagtcttagtcccaaaactgaagaacttggagttgtatggttgtatgtttgagggcaggaagcatccagcacgggagaaagatgtaggctgggaggctaggcccatctctccttttcacatttttctgcctgctttatattccctggaagctgattagattgtgcccaccagtttaagggtggatctgctttccccagcccactgactcttttggcaacacccacacagacacatccaggattaataatgtgtatccctcaatccaatcaagttgtcactcagtattaaccatgacatttgcttaaaagagagaatgaatgctggggaggctgacaatcagtgttcactagagcaagcatgaataatgtggggtccctgtcttcaaagactttgaggagcactcctccaaccccaggccagatcagttcatgacctgaattagcaggctgtgtctctaccattgtacagaaaaccatttcagttctctgtttctgttgggctgtattccccagtgatccctggaaaggagtttcttttttctcccatcccctgacactcctctaggaagcacatagccttctagggagagttaatcatggtaccaagtagagactcagccccactcccagggcaaagccatggcatcctggctttggccaggcaggcaactgagagttggacaagcctgggttcagatcttatctctgccctgtattacttaccagctccaagcctcaggttctccatctttaaaactgggcatcatatccctttctcatggattgattattgggatgaaatgaaaggatcctaagcactatgcctgctgcaaaggaagcagtacctaagtgttgtgattgttgatactgttgtatggtgtttggatttaggtcagctttaatcctcattggtttctgctggatatcgccccaccctacagcatacctgaatgcagcaatcagtattgattgaacatctgaaatgtaaaataagatactgagtatcagggaggagtcaaataaatgtacgttacagtccctgacctcagtgaacttgcagtcgagttggttagaagccctctaggatgcaggcaaaactctggtccaggagttgggaaatcttggttttccttccagggctgttacccctggctgtctggctcttgttagatcactcaacatttcagagccttggtttcttcatctggcaaatgtgcatattgatgccatctgcatacctcacaaaactgttgattgttgggaggtgtgtgatcaccatttggaaaccagaaattgttcagatggacaaagtatcattatccctgcctagtaagacagcaaacagacaggcagcgtagacattcagctgttgcgcatctgtagcactgttcaatctgattggttgggcatgtttttgggtgtgtgttctgattggttgagtgtatattttgattggccaggcctattttctgattggctgggcatattttctgtttggctgagcatatttcctcattggcttggcgtgattggttggatatgtttctatttggcccatgccagcccataagggtggttaaatattttcagtaacacccctaaacacaagcacctacctcactaagcataagaaaatattcaagcctcagtttcctgatgtatacagtgatagcaatactttcctggcaaggttatggtgaagactgtaggaaatgaaatgttaaggattatggtctgtcccatccacaagactgtgctctgtaaaggcaatatcttatcttttctgttgactgccatatcctcatatccatagcctgctacattataggctctgaacaagtatgttttgaatgcataaatgaagccccaatgccttatgctaggggcacaatggttactcagtgaatccagattgaggacgttaggggtcatcagagatgaaggatgcagttggtgtcggacaatggtgggggtggtgaagattgtggcaaacaggagatcacctcctcctccacttctaaagaaggcagtcaacgtccagtccaagtcagtcattgctctatgggaaagggaaaaattgtcatcacattatccaaattttctgagagaagccagacatctagatttttgtaggtaatctcaaaatttttaaaatattggcaatggagtaaaatgttttttataaaaaccatcacaggttaagcaatatatatatggggccaccagtttgtggccattggacctgccataaatggtatgtcccttgctgattcttgtaactggaacttttgtctttaaaaagacagggttaggctgggtgtggtggtttacatctgtaatctcagcacttcgggaggccaaagcaggaggattgcttgagcccaggtatttgagaacagcctgggcaatgtgctgagacccccatatctacaaaaaaataaaggtaaaaaagccagacgtggtggtgtgcacctgttgtccccgctactcaggaggctgaggcagcaggattgaagttgcagtgagctatgatcacgccactgcactccagcctgggcgacagagtgagactctgtcactaaaaattagaacaaaaacggatgggtcagacttccttctcatccttaggactgtgctcctggcccctcccctgatctccagcatcactaacatgccacaaaagcctgttctcccggctatgattatgcccctaggatgtagctttgataacttggattttcaccttggggatttacctctttgtcactcatttgaatggagggactcttccttctccaaataacaggctgcttccaaggccttgcgtggacgtgccacagcctcccacccatggcaccctgggcccgtgctggctcctggcacacacctgcactctgaggcttggccccatcagtctgtgggcaggatctgagaccctgcttttcatctcaggccaaattcttcttggccggggataaaagtgaaaagtgttctaccgtgtcccatgctgctctgttgaaggtctctgttaaagccattctttcctttgctaaaagtcagggcatgaccaggcaggcggaggtgggcacttagcttcttcgcccttcactctctcctaccttaacagggagagtaaaaccctcctctgtttactctctttactctcttcctccgtcacatctgtcttcaggtctgtctgtctggatcatccagtctctttttctgttactttcttccttgagccctgtcttcctctctcttttctctgtgtggctttcaccctctccgtctttctttctcctggtcaccatgtctctcatctctgtctctgtctctgcctctccctggctctttctccctctcctctccccgctggctgtaatcatccacccttcacagcctcatgaacactggcagcccttctgcgctgcattccttaaaaacccttgccgctgacagagaggacttggaggtggtggctgggggactgcgggagggagggaagactaagccccttcagaagtcagagcatctgtctctttgggagcaatgccggggctttgatgctaaatactgaggagtgaggaggagggggcagatggcagaggaggagctctgtagggcgggtgctggtgcgccccttcagaagaaactcgatgctgactccatcatgacaagcctggggtcctggatccccggggttaattggcctgccttggcctgcttccagctggagtatttactttctattccccaaaccctccaggctttggctgcagctttctctggaaaccctaggaaacagcaccttgtcctgcagtagctctttctgggaggctgcgagccccggtagggtcaccttgggctgccgcctcacctgtctgtttgtccatctataaaatgggactaattgatgtaagtgttcccggcctcgcagagctgccacgaggacccagtgagctgatactgcatgttatgggctggaaatggctggataggttcagctgctgcttctgcagagggccaaataacaagtattttcagctttgcaagacaatagccctggccctctgtattcatggattttacatccatggatttaacctacttcagatctaaaatatttgaaaaatcatggataattatgtctgtactgaacatgtactgacttttttcttgtcattatttcttaaacaatagagtataacaactatgtacataacatttacattgtattaggtatcataagtaatgtagaggtgatttaaagtatacaggaggctttgtgtaagttattaatatatgaagactatgccattttatatcagggacttgaacatattggattttggtatatgtggggtgtcctggaaccaaccccctatggatactgaaggacagctgtacacacacacacacacacacacacacacacacacacacgcacatacacatgcacattccagaagacataattgtttttcagtgctgtattcggaattgtaagaagagttcaagcagagtggtttttgatgaggcttctccacccactgtatttgatgagaacatttcatgcttagccctcatgagaaactaaggcgttgatctaagattggccacactgttccatcacagccccttccaaacagttagagattttgcttccaggaacattgggtggggaggcagattgtgaaattgaggtttgcccaaggaacaatatgacctctacatgggtgtaaactcaattctgctagcaggtatgtggttgaagttgggattcaggggtctatagtgaggagatgatttcttacttagctaacttctttccctttgggaaatcccatagaacttgggcagaggagtggggattgttatcaaaagagggacacctggcatggaggcctccaagattgcatttgtagaactttttctgatataagtaacagagaaccaccacatactggtttcagcaaatacaagtgaacatgatggttcatgtactaaaaaaaaatccagttctagaataaaggcatcaggaatggctggatccaggagctcagtgtcatcagcacacattctttctctttcttcatctcacagccttgtttttctccttgtgagttttattcccagttaagcttcctcttcatagtagcctttgactgctccaaacttccatcttcacagttctaagtgtatcagaaaaagagtctcagtattagctctgattagatggatggaaacacatacatgtttatcctgaactgatcactctaaccaactgtggcccaagttattggtccactcttgaagccatggagtgaatcaactccactgaatcaactgggttgcaatcaagcggagtggatttccaaagaccagggtgacgtaattaccagaatagggatgctgagcacgcgagagcaactgctgcctatagataccaactggtctgtgggttgggcacctgtgattcatgctctcgtttgtttgtccccccatggagtggccaggggggaatatgaatgattattaattcgaaagaggagcatgaacctgtttgatgagtatttctctttctgattattcaagattgtactttcagagagtgtcaggaatccctcttttccccactttcaccatgggctttctgctgaccatgaaacaagaagaaagcgcttcttgcctagtggtttccaaccttgctttcacattcaaatcacctgggatgcattttaaaattctgatccctaggctgcactctggtccaatgacatcagagcccctggaggatagggtccaggggttagtactttttaaagttccctgggtgattgcaacatgcagacaagatcaagaaccactgatcctgctttagtagcctgcatattcagcagctgtcctagacaggtggagctaaactctagtaggattttctgaatacctatgacttccatgtagatgctgcgaactttttcttctcatctcaaaccgtatccaagccctagaaataaaaacaggttttagactgtgatatgatccatgtaatttacaggtgcagaggcctcgctagggccataattcaccagtgctgttcctgcttactaacacactgattactgtcagattatctggtctgcttgctatatcttcagccaaactggcaccaaggcagctgctcagccccttgaatccacatttgcagaggtggagacagtgagtggccaggcaggcaagaactacatacacaactgtgcttcctgggatggacgacagacagatcagcctgtggggacaaggccaaagaggaggcttcaacagctgtccagagggcctaaaacatctgccacaccccatccaaggatcattcattcattcattcaacagatgcttatgggagatctgcaaagtcaggcatcgtgcggtagtgttaagaataaaattgtcaagcccatacctaagatttagagtgagaggaggctctggcggttcctaaatgctggttctgtggatccactgcatttgaatctctttcccatcttatacctgctgatccctgtctctgaggctgggcccagaatcggggggctatttaacaagcactcatggaattaggatacagagaccagtctgcagaccagggttaggacctggtgatgattttcaccaactgccaaccacctgagaaaataatggcaatgtagtgagtgtttccataaagtatgttcgtgcacttaataaacaaacttttagtttaagatcatatcctgcatccttttttggtgttaaatgtcttttaaaaatgaaatgatgataatgataaatggctattttgttgttgttgttgttttgttttgtttttgagatagagtcttgctctgttgcccaggctagagtgcagtggcacagtcttggctcactgcagcctccgcttcccaggttcaagcgattctcctgtctcaccctcccgagtagctaggactacaggcacccgccaccatgcccggctaatttttgtattaatatttctaggagagatggggtttcaccatgttggccaggctggtcttgcgcttccggcctcaagtgatctgcccaccttggcctcctaaaatgctgggaccacaggtgtgagtcaccgtgcccggctgatggtttctatttagtgtccttactaggaaagaaaagttgctaactctaggtagtcccctatttattaatttcatgggtgcataaaatccaagtcagaaaccatttctctagattggcattttaaaactttcttcttatttagcaataaaacctctcttctaaaagaatcctgtctaaaacctcagtagatgaatgagcagataaaagtggaatcactgtgggttacatggagcctgggggcctggtttcccatcccctgggtctccccttccttccactccctaacaacagtggcccctgagacacctcctccttaaaactcaacttggaaactactctcctagaaatttctttgaatgttataaatgggaaaatcaaggctctagaaaggaaagtattttccccaaacttctaattcctatttgagttcagtcatcacaagatcagcatatcattgattaatgaaaaaggtccacccgaactccagtatggcttagagcctggtaaggtatcaaggggcatggtcttctttgtaacaacctttggggaaggtggagtctgagtcttctccttttgtaaatgaggacaacatggtccagctaagttaagcagctttctcagggtcaaccaagagggaggaaagattcagggacaggtacgtttaccttgaggtccagagctcttttctgctttttctgatgctgcaaagttggctctggatccttgaaggaagccttgaaaatatatagaaactatggcttttcccctaggacaacttccaactctgtatcttcaagagtcattcctccttctgttcatccaatcagaaacattttttgagtgctcaccccctgtgatgggcaacgaggaaacggatgaattgatgtccaagatctccattctcatagaacacccaggctgctgggaacacagatataaaagggccgattatgacaatgttaagagctgcaaagtggaagttcagaatgctacagaaatctacaacaggggagcagcaatggtgaggggacagggatgcctaatctagccggggatcaggggaggcttccacgagtgagtgtcgttaaactgcaaggctgcaaggctgagtagggccagccagatgatgaacggggatgggatggaagtgcatttaaggcagaaggaatagcctctgctgaaagagcttggcaggtttcaggaacacggaagattctgtggatgaagcaggggagagagaatgttagaggtgggactggagaggtgggtgggagtcagatccagattttagtttagtatccaggctttcatctcggacctgagggaagctcacaagccttcgcctcaggtgctactaaaccgtgctgtttctattcttctcttcaagggcaacttctgctacctgacaggtaagtctgctatgggttaaattgtgccccccattaaaaaagatatgttgaagtcctaacccccaataccttggaatgtgaccttatttggaaacggggtccttgcaggtataattaggcaagctaaggtgaggtcatactggagtagggcgggcctttaattcaatgtgactgatgtccttataaaaagaaggaaattcagacacagagatgcacagggagaaaggtcatgtgacaacaaaggcagagattgggatgacacagctgccagtcaaggaatgccaaggacagctaccagaaactaggaagaggcagggaaagattctactagtggtcttagagggggtgtggccctgatgacaccttgaaaaataaaaacttctaaccttgggaggcagaggcaggtgggtcggctctgaggtcaggaattcgagaccggcctgaccaacatagtgaaaccctgtctctactaaaaatacaaaaattagctgggcgtggtggcacacgcctgtaatcccagctacttgggagactgaggcaggagaatggcttgaacctgaaggcagaggtcgcagtgagccaagattgcaccactgcactccagcctgggcaacggagtgagattccatctcaaaacaaaacaaaataaaacaaaaaaaccttacagctttcaaaactgtgagagaatgcgtttccattgttttaagccatccagtttgtggtactttgttacagcagcctaggagactaacacagtgtctatcaggggcatgtcttcagccttgactcagcaagtggcgtgctaatgagtccgtttcccagtgactgtataatcagtctgggagtaaactgggtgcttttggggggaagtgacatgagctcttctcagctgtgaaattgctcatcagtcaatgtgttcgagtgatcacctcacagatggccccccagtgaccataaagagttacatactctttcccaaaatggcccattgctctgggcggctgtttgccatggaggggtatctggacgtgctgtccacgggggcccagggaggaggaaggggtgggagccagttagacatgactgttgctgctgctgctgcccaacctcaagtgcatgagtctgtactgcctgccacactgtgggaacacgctctttggatgaaactattttcccagttaaaagagcttcatcaaggctgggcacggtggctcacacctgtaatcccagcacttttgggaggccaaggcgagtggatcacctgaggtcagaagtttgagaccagcctggtctacatggtgaaaccccatctctactgaaaatacaaaatttagccgggcgtggtggcacatgcctgtaatcccagctactggggaggctgaggtgggagagtcacttgaacttgggaggtgaaggttgcagtgagctgagatcgcgccactgcactccagcctgagtgacagagcgagccttcaaggctgaatagggctccatctcaaaaaaaagaaaaaaaaagagcttcattggaaccccccatctgcttcctcttgtcaccccagtttctgatgtaatagtaaactaagtgaagcgtgtcttgattcagaaaggccacccgtcagttggccatgatggaatgcatattgaatggattcgataccaccaaggagccgggctctgccaccccttgctgtgcaatgttggctgggttagtcaacctccctgagactcagtttccccatcaggaaaatgaggatttttccacttcccctgcagctttgtgacaaagcttaagctctggaatgcatgacagagtggcttctaagttgaagagtgctattctactgtcggggaggtggtggagaaggttcctagcagcccaggctggcagaagctgcggtgaagctcctgatccatctgtttggagtttgtggtgggaaatgccccttgatcttcctggtattgacggatacatctgaagaggacatttctcccaccatgagggagggtgcaacaggagacatctcccacctcaagtattgttttgagttttctcgctggctttccctttcagtaaaatattaaaataatataataataataataataataataataataataataatacgctgggtgcggtggctcatgcctgtaatcccagcactttgggaggctgaggtaggtggagtccttgaagtcaggagtttgagaccaactttgccaacatagtgaaaccccatctctactaaaaatacaaaaattagccgggcatggtggtgcacacctgtaatcccagcttctcaggaggctgaggcacgagaattgcttgaacctgggagacggagtttgcagtgagctgagatcgcaccactgcactccagcctgggcaacacagcaagactctgtctctagtaataataataataataatgatgataataataataaactagtgtgtctacatacacacatatgtgtgtatgtgcttatatgtatatgtttataatctattaatatgtatactttaaaaataaaatgcagggccaggactagggtggggctgggaataaaggcttgccttggatgcaaaatttaagaggtgccccaaagctcagatatcaagatgaaaatattttaatacaatattttcaaaaactaagtgggcaatgtacgtgaaccagctgccttttttgtaaaataaagttttatttgaatgagggccgggattagggtgtggcctgtgaagcagtgtcaggtaggtgcagggctaaatcccgtctttatgtaaaagtctttatcgatcgtactttgttggtcatggagttttggggggcattcattttgatttttaaaaaattattgcattaaaatatttttatcctgatacctgaattttttggatatccccttaaattttgtgctggaggtttttcctcacttgcctcatggtagttccagccctgataaaatgaacacctgagtgctcagtcctgaatttgaacttgagaaatcgaatatcacaagctcctggaagccccgatgtgcatttcctgattaccttccccttcctttcctcacagagatagcatcatcctgagtttgtttgaccaggtctcactttcccctgtgggaaacctcacatgtacatgtccctaaatagtatatcttttaattttgcatagttttgaacttcatagaaatgagatcgtatttcacatattctgcagcttttttttttttccctgaatattgtttttgagattcgttcagggctatgtgaacagttcagtatctctgaaatagggctgtgaattgcactgtgtggcaccccacagtggctgtctgcccagcatggtgagggtgtagctgtcattgcctgctcatccagggcccatggacgtggctcttcatgttatcacttcagtcgtgttgttcattgttgatcttacatgagtttaaccggaatttaaaaggacttcaaaactattacactgtaatttggcattaaaacaaaaaatcacctataatattgtctatgcaggaagacgtgggaagagagcagcataatatataacaaaatatatctaaataaaaagattttaaaataacacttaggcaaaaatgttaagtatgagaaagcggtgtgtcctagattcattggcagcctctttttatcttagtggtttgtaaattagtgatgtacttcagtcaatgtcgtgttagagtggaggaaatatagtaacacttcattctatgaataggccaccattaatgtaagcattcctctgttgaaagacatttggattctttcctgttttttctgtttatgtatgtatgtatttattttttaccttgaggcattcttggacattcttcttgcacacttgagcatttaggacagttttgcaaacttctctggtgttaccagttacttaggcatttatgtaaaaataagactgaggcaggagaattgcttgaacctgggaggtggaggttgcagtgagctgagatcgtgtcattgcactccagcctgggcaacagagcgagactctgtctcaaaaaaaaaaaaaaaaaaaaaaaacccaaaactgactgctgggtcccatttctagcctcttgaatcagccttcccagggacctgactgacatttagtcattgattcaagtgcccttcttaatttttatcaggaaaagtgttggaaatatcaatctaggaaatactcctggaaatagatctgctcagtctgagagtctgcacatctgcaactggatgtgatcagtttctcaacctcagtgctattgacaactgagatggataattctttgtggtaggggctaccctgagccttgcaggatgtgtagcagcattcttggcacctaccattacaggctggtagcactcttcccctaccatctacacacatacttatgaaaccaaaatgtctccagacattgtcaaatgtgccccgaggtggggatgagtgtcaaaatcacccccagttgagaactactggaacaaatgatgtataattggctgacaaaattgttgcatcaatttatatgctcaccagctttgtttaggttgctccatatccttgctaactttcatttggccaggctgcttaaattttgtgccaagaaggtgaggagatggtgcctcagtttaatttcagtttgcatttccctaattgctgatgaggttgaaggtcttttcccaagtttatagtcttcttaggtttcattacctgtgaaatgtctctgtcatttgccattttttcctattaaattacctctctttttttttattgacttttagaaactaaaaaagtattctgaattctaatgctttggtatatatgtggcaaatgtctgctggtttgtagtgtgccttcttatttcctttattggctcttttgatgtataggggttcttaacgttaatgcagtcaaatgtatcatttctttcctttatggtgttgacttttaaaaaatgttatttaacaaattcttcttccctgaggtcataaacgtattgttctatatattcttctaaaatctgtgaagttttgcctttcacatttaagctcttaatcaacctggaattgatttcagaatatggtataagttagggacctattttttttccagatgaataaccagttgcctagtggcgtttattgaataaccttccttcctctactcatctgtcatgtcaacctgtcattgatcaggtgtgtaccttaactcaggactgtttctgtactccctattctgttctcttgggtgtgactggttttttatttcagttttcctctttcatatctacctggatgatcttaaatgttttcttattatatatatccttacatatatatatatctccatatacatatatccatatatatatatatattttggagtacataagatttattttaatttttttattttttaactatttttccaacaaacacgggagtgcagatatttcattgatatacggatatttcctttttttgttgttttgcttatatacccagcagtggaatatttctctcttcaatgaaatgtggtattgtagaatggatcttacaatagaaaaagacattagtggaagatgagtaaaatccaaataaagtctagcatttaaaagtagtaacatactggccaggtgccctggctcacgcctgtcatcctaggactttgggaggccaaggcaggtgaattacctgaggtcaggagttcaagaccagcctggccaacatggagaaaccctatctctactaaaaatacaaaaattagccaggcatggtggtgtgtgcctgtaatcctagctactcaggaggccgaggtgggagaatcgcttgaacctgggaggtggaggttgcggtgagctgagatcgcgccactgcactctaggctgggtgacagagcaagactctgtctcaaaaaaaaaaaaaaagtaacataccaatgtggtttctttgttttgacagatgtattgtggttatgtaagaggttacattacagaaaactgggtgaagggtatatgagaactcttttgtactatctctgcaacttttctgtaaatctgaaagtattccaaaatgtaaaccttgattaaaaatatttatctcattaaaaaattatattttctgttctttatttcttaatccttaaacccatcacttactttggcgtcttatactgatcatctcttgggtttaaaccatgtatcttaacctttcatctcttttgcctttcatcttttaaattttggcttcattgactggcaatctttgttattttaaattccttttcttttatctcactagttagaggaaaaacagttaatgtcttctatttattggaattctaactcatttttaacttctaggttattcatctcttttagtttgctcttagttttaatcacttcataatcacctaccctccctttgttgtttaaaatatagggtgtttctttcctctgcccctttatgtctgtagtccattatttttagtggtgtttttaatagcagaaaaagtctggctgtggggaagacaggaaagagcaagtccttatcatgaatgaggggacaggagacttgcttccttctgcccctgaattttagcagcaaactctgagttttccagagaacctccatgctgggagactggccgtgggttaacctgcaatttgctgtgtgtggatgtctgattggctggaacagcagcctccacaataccttgggcaggtcttgtatgtggcattgcctccttgacaatccagggctcaggtctctggagccattgcatttgggcctccctaacctctgctgggtgggcttaggctggataacttctctcacatctccatctttggggtggccagagggtctgccttctggacccaactctgtttcccaggaagatgaatatgatttgtctcaacatttacattctcccaaccaagaaaaatatcatctactcggaagtaaccctggttgatttcagatttctcaggacaggccagtcatctctggagttctgaatgctgaacagggcttgtctgatgggatccagccctgattcctgcctaatgacattgcttccctgtggccggttctcttagccatgcgagtgtcacccgagagggcaattcctcctcgcttgtgtgtgtgaacctgggaaaaggatgactcccataaggctttatcctggggggcacctcactctagccctttttttgcttggagtgaattttcttcttgttttaattttggtctggcaactgactgaattcatgggtgttgtcaaaaagtttggtacttgaggagggccaggtagactcaggggctttcagattctacagaggatctgatgcatgcaatggcttttggaagttccgtcttgcatattttgtctttctccttccattagatgaatgacaacttcaaacctgttcagtgtgtgtagttttcctctaaacgaggctccctccctctccctacctgatcagagctacctttctttttggcttttgtggacagggatttgttatgggataagctgtaagaggtcaaggctggaccttggttgctgactcttggatagaaactgaactgccattcatttgatgtatagtcatggatcgcccaccacatgctaggggctgggctaggctctgggtatgtaagacagacacagcgtccgcctttatggactgattgccagataggaaatgggaaaacaaatcatccagatagttccaaaattatgtgaagcagagtcaggcagggctgcctggtccatatggcatcagttagaaaaacatacttccctggacagcatcaccccacactggggcatgtctggaggagcacagtgcaggtgaaattccacccccaatttgtctccctgtaccgggttgagtagcatcctcccaaaacttatatccatgcagaaccccagagtgtgattttattaacagaaatagggtctttgcagatgcgatgagttagggtgaggtcacgatggattaagtgagccctaaacgcaatgactgatgtccttgcaaaaagacacaggaaggagaccatgtgaggacagaggcagagattggagttatacagccacaagccaaggattgccagcaactatcaggtgatagaagagaggcatggaatttatccttcctagggcctctacaaagaaccaatcctgtcaacaccttgatttcagacttctctagaaccgtgagagaataaatatctgttgttttaaggcacacggtttgtgattttctgttatagtagttctgggacactgatattccctgacccaggagcccttgggcaaggcgcaacccgcacacctgttcctggtggctctgctgagaagaagacattcaagctgagacatgaagatgaaggaggagccagatatgagaagaaccagaagaagagtgttctcagcggagagaagtggaacttccagggacttgaagcaggaaagaggttggcaatatttagagaattgaaaggaaatccacatcactggaggatagtgaacatcgtaacttaagtaacattatgaaggcaggagttgctgaaaaatgtcttttgataaatcaaatcactatttccagtagccatgcaaaaggggtatgctccagctttttaacaattgtacctgaatgactttattcccccttggaataattggatgaaagctctcctgcaactaaaaatagagcagttcattacagcactattcacaatagcaaagacatggaatccacctcaatgcccatcagcagtggactggatacagaaaatgtggtacatgtacgccatggaacactacacagccataaaaatgaatgagatcatgtcctttgcagcaacatggttggagctggaggccattatcctaagtgaacgaatgcaggaacagaaaaccaaataccgcatgttttcacttatacttgggagctaaacattgagcacacatggacacagagaaaggaacaacagacaccagggcctacttgagggtggagggtgggaggagggagaggatcgaaaaacagcttgtcaggtactatgcttattgcctgagtgatgaaataatctgtacaccaaacccccatgacacgcaatttacctgtataacaaacctgcacatgtacccctgaacctgaaatcaaagctagaaaaaggagtaggtggcagggcatggtggctcatgcctgtaatcccagcactttgggaggccgaggcaggttgatcatgaagtcaggagtttgagaccagcctggccaacaaagtgaaaccccgtctctactaaaaatacaaaaaaaattagccaggcatggtggcgggcacctgtaatcccagctgcttgggaggctgaggcaggagaatcacttgaacctgggaggtggaggttgcagtgagccaagattgcgccactgcactccaacccaggtgacagtgtgagatatcatctcaaaaaaaaaaaaaaaaaaaaaggagtaggactagagccataagcattctcttacagcctgtcatataaaggactcaatactggtttaatgaagttgttgaataatgtagtttactgctgtaaattgagaatggtcttaatagacaactagcctctcctattaataattctagccaaaattaaatgttcctggacagctatgaaaaaatagtcagaattttggcagatgacttcctatatttctgacttttagttaatggtcttttgtactgtattactccatcctgataccagtaatatatttgcaactagtttatttttgtgggtataccaggaacttgttgctgctcaaaataaatgttttatggggactctatgctttgcaattttgtttaatgaatgataataacagctcacatattgcatactgcttttggtttaaaagtactttttgtgtattatttcatttgataaataatggtaattatccctgctttaccctcaagtcactcgattcttcctattgatcagtacatgacaaacactggggtttcatttggattctggttgttaatgaactcttggtatgcttgaaaaggaaccaactaaagattatctagctatattatcataatatttagcatattggaatatggatgaagaaaaataattaggcatgaaaaatgtagataaaagtcaagattgtttctctgatggagaaataaaagacctagatttatgataatcacaaagaagaatcatgaaattgttgtttagtcataaaataaaagtctaagatatttttcaagcacagaagtagttacaggaggtcaggccatcatataggcttgctgttttaaaattgcatctctctagcagctcccgactcagccaggagtcatttaatcactcaacaaatttttatttatttctttatttagaggcagaatctcactctgttgcccaggctggagtacagtggagtgatcatagcttactgcagcctcaaacacctgggctcaagtgatcctcccatttcaacctctcaagtagctgggattacaggtacaggccactatgcctggctaatttaaaaaagttttcttgtagagacagagtttcactgtttcccaggctggtcttgagctcctggcctcagcctcccaaagtgttgggactatgggtgtgagccagcacgcctggcttactcaacaaatatttactgagaatcttattctacagcccgtctcttgtcagcctggggagcatttttacttctcacagagctcattggcttggattgtgaatcctcaggtctttggagaatctatacccacaggaaacagtaccattgtcctttatcagcagggttcctgctttttgcagaagatgtaaccccggtccccagtttctctacccatcaataccactcattggtaccactcattggtcccaatctctttcatccattcaatgactgcaactcccagagaaccttgcgtccctaccctctgccaatttgcatttcctaattagctctcaaatcacttctctccatccacctttccactgctgggtcagaaccatcaccaccgcccacagtctcctaactcctcgtttccctttgccttcttccaattcattccccactctgcagacaacgagatctttgaaaaggcaaatccgatcaggtagcccctgtttataatccttccatggctgtacaaaactcagtccttggcacactaggctctgtgtgcactagtgcctacatctccagcttcattttgtaccatatctcccccaaccttccaacccctcttcctttacacatgcacacacatgtgcacacacacatacacatgcacacacacacacacattttcttcctttcctcccctactggcattcttcataccaccatattgtcttcaaccccagggcttttgcacatgctgttctctctgcctagaacacaattgagcatcgagcacctacagtatgtgtcatctgttggcctgcagtttggtagataagtgtttccgcaaatgagaatcactgggctgctgagagacgtcgctagtgggaggacattaggcatgtgcaacacctgttccttagaccccagggatttttcttcttcctctgcgggggaaggaatccaaagccacttgagaatggtcctgttggcctgtccatgagcactcccatgacccacttctgcatgagtccagcaggctgaacaacaaagcagatggcagcatccttggtaaagctgctggcaggccacttggtaggggacttgctgttgcttgttttgctaaaggttgaatgatgggagtagactttatggaggatatgtacaactcttcttgttatgccagaattagtctttgcgtgatgccagagctgcattattttaacttctcattgaactacttccacagacttacacattggttcttatattcttcactatcaattaaaggacattttaagacaattccaagagttgttgaggatgttgattgctatagtaactagtgtcctattgaggacatataggagtaatttatttctgatgtcaggaacaggaagagttctgattctcatgcactcttgttttgcagattatggaactagtgactgagtcagataactgctgtgttttcctttttgctgtgatcacgaggaaactcaaaatcaaatctgtgaccaacttattgcaattgtcagcatagattttgtgttcttttctcccgtttggtttcacatgtttttcttactcttgtttccttcttgtccagttttctcattagaccacaaaaaacaccttttttttctgtaatgtatgaatgtaagcagttttaagtatattctgacataaaccaaaggcatagaaagcattccaagatggccaaataggaacagctctggtctgcagctcccagcatgatcgacgcagaagacggtgatttctacatttccaaatgaggtacctggttcatctcattgggactggttggacagtgggcacagcccatggagggtgagccaaagcagtgcgggtcatcaactcacctgggaagcgcatggggttgggggatttccctttcctagccaagggaagccatgacagactacctggaaaaacaggacactcccacccaaatactgtgcttttcccaaggtcttagcaactggcagacaaggtgattctctcccatgcctggcttggtggctcccatgcccatggagccttgctcactgctagcgcagcagtccgagatcgatctgccagacagcagcctggctaggggaggggcagccaccattgctaaagcttgagtaggtaaacaaagcagctgggaagctcgaactgggcggagcccacagcagctcaacaaggcctactgcctctagactccacctctgtgggcagggcgtagctgaacaaaaggcagcagacaactcctgcagacttaaatgtccctgtctgacagctctgaagagagcggtggttctcccagcatggcgtttgagctctgagaacagacagactgcctcctcaagtgggtccctgactcccgtgtagcctaactgggaggcacctcccagtaggggacaacagacatctcatataggtggctccccctctgggacgaagcttccagaggaaggatcaggcagcaatatttgctgttctgcagcctctgctggtgatacccaggcaaacagggtctggagtagaactctagcaaactccaacagacctgcagctgagggacctgactattagaaggaaaactaaaaaacagaaaggaatagcataaacatcaacaaaaaggtcatctacaccaaaaccccatctgtaggtcaccaacaccaaagaccaaaggtagataaaaccacaaagatggggagaaaccagagcagaaaagctgaaaattctaaaaatcagagcgcctcttctcctccaaaggattgcagctcctcaccagcaacggaacaaagctggacagagaatgactttgacgagttaacagaagtaggcttcagaaggtcagtaataaactctgagctaaaggaggatgttcgaatccaccacaaggaagctaaaaaccttgaaaaaagattagatgaatggctaactagaataaacagcatagagaagaccttaaatgacctgatggagctgaaaaccatggcacgagaacttcgtgacgcgtgcacaaacttcaatagctgattcgatcaagtggaagaaagggtatcagtgattgaagatcaaattaatgaaataaagcaagaaaacaaggttagagaaaaaagagtaaaaagaaatgaacaaagcctccaagaaatatgggactatgtgaatagaccaaatctacgtttgattggtgtacctgagagtgatgcagagaatggaaccaagttggaaaacactcttcagtatattatccaggagaacttctccaacatagcaaggcaggccaacattcaaattcaggaaacacagagaacaccacaaagatactccttgagaagggcaaccccaagacacataattgtcagattcaccaaggttgaaatgaaggaaaaagtgttaagggcagccagagagaaaggtcaggttacccacaaagggaagcccatcagactaacagtggatctctcagcagaaaccctacaagccagaagagagtgggggccaatgttcaacattcttaaagaaaagaattttcaacccagaatttcatatccagccaaactagacttcataagtgaaggagaaataaaatcctttacggacaagtaaatgctgagagattttgtcaccaccaggcctgccttacaagagttcctgaaggaagcactaaacatggaaagaagtaactggtaccagccactgcaaaaacatgccaaattataaagaccactaatgctaggaagaaactacatcaattaatgggcaaaataaccagtgaacatcataatgacaggatcaaattcacacataacaatattaaccttaaatgtaaatgggctaaatgccccaattaaaagacacagactggcaaattggataaagagtcaagacccatcagtgtgctgtattcaggagacccatatcacgtgtaaagacgcacataggctcaaaataaagggatggaggaagatctaccaagcaaatggaaagcaaaaaaaaaaagcaggggttgcaatcctggtttctgataaaacagactttaaaccaacaaagatcaaaagaagcccattacataatggtaaagggatcaatttaacaagaagagctaactattctaaatttatatgcacccaatacaggagcacctagattcataaagcaagtccttagagacctacaaagagacttaggttcccacacaataataatgggagactgtaacaccccactgtcaatattaggcagatcaatgagacagaaggttaccaaggatatccaggacctgaactcagatctgcaacaagcaggccaaatagacatcttcataactctccaccccaaatcaacagagtatacattcttctcagcaccacatcgcacttattctaaaattgatcacataattggaagtaaagcactccttagcaaatgtaaaagaacagaaatcacaacaaactgtctctcagacgacagtgcaatcaaattagaactcaggattaagaaactcactcaaaactgcacaactacgtggaaactgaacaacttgctcctgaatgactactgggtagataacaaaatgaaggcagaaataaagatgttctttgaaaccaatgagaacaaagacacaaggtaccagaatctctgggacacatttaaagcaatgtgtagagggaaatttatagcactaaatgcccacaagagaaagcaggaaagatctaaaatcaacaccccaacatcacaattaaaagaactagagaagcacgagtaaacaaattcaaaagctagcagaagacaagaaataactaagatcagagcagaactgaaagagatagagacacaaaaaacccgtcaaaaaaatcagtgaatctaggagctggttttttgaaaagatcaacaaaatagatagactgctagcaagactaataaagaagaaaagagagaagaatcaaatagatgcaataaaaaagtgataaaggggatatcaccaccgatcccacagaaatacaaactaccatcagagaatattataaacacctctacgcaaataaactaggaaatctagaagaaatggataaattcctggacacatataccctcccaagtctaaaccaagaagaaattgaatctctgaatagactaataacaggctctgaaattgaggcaataattaatagcctaccaaccaaaaaagtccaggaccagatggattcacagccaaattctgctagaggtacaaagatgagctggtaccattccttctgaaactattccaatcaatagaaaaagagggaatcctccctaactcattttatgaggccaacatcatcctgataccaaagcctggcagagacacaacaaaaaaagaaaattttagaccaatatccctgatgaacatcaatgcgaaaatcctcaataaaatactggcaaaccaaatccagcagcacatcaaaaagcttgtccaccacgattaagtcggcttcatcccggagatgtgaggctggttcaacatatgcaaatcaataaatgcaatccatcacataagcagaacccatgacaaaaaccacatgattatctcaatagatgtagaaaaggcctttgacaaaattcaacagcccttcatgctaaaaactctcaataaactaggtaatgatgggacgtatctcaaaataataagagctatttatgacaaacccacagccaatatcatactgagtgggcaaaaactggaagcattccctttgaaaactggcacaagtcagggatgccctctctcaccacttctattcaacatagtgttggaagttctggccagagcaattaggcaagagaaagaaataaagggtattcaattaggaaatgaggaagtcaaattgtccctgtttgcagatgacatgattgtatactagaaaaccccatcgcctcagcccaaaatctcctaagctgataatcaacctcagcaaagtctcaggatacaaaatcaacgtgcaaaaatcacaagcattcctatacaccattaacagacaaacggagagccaaatcatgaatgaactcccattcacaattgctacaaagagaataaaatacctaggaatccaacttacaacagatgtgaaggacctcttcaaggagaactataaaccactgctcagtgaaataaaagatgacacaaacaaatggaagaatattccatgctcatggataggaagaatcaatatcatgaaaatggccatgctgcccaaagattcaatgccatccccatcaagctaccaatgactttcttcacagaattggaaaaaactactttaaggttcatatggaaccaaaaaatggcctgcattgccaagacaatcctaagccaaaagaacaaagctggaggcatcacgctacctgactttaagctatcctacaaggctacagtaaccaaaacagcatggtactggtaccaaaacagagagatacaccagtgggacaggtctcagaaataacactacacatctataaccatctaatctttgacaaacctgacaaaaacaagaaatggggaaagtattccgtacttaataaatggtgctgggaaaactggctagccatatgtagaaagctgaaactggatcccttacaccttatacaaaaattaattcaagatggattaaagacttaaatgttagacctaaaaccataaaaaccctagaagaaaacctaggcaatacattcaggacataggcatgggcaaggacttcgtgactaaaacaccaaaagcaatggcaacaaaagccaaaatagacaaatgggatctaattaagctaaagagcttctgcacagcaaaagaaactaccatcagagtgaacaggcaacctacaaaatgggagaaaatttttgcaatctacccatctgacaaagggctaatatccagaatctacaaagagctcaaacaaatttacaagaaaaaacaaccccatcaaaaagtgggcaaaggatataaacagacacttctcaaaagaagacatctatgcaaccaacagacacatgaaaaaatgctcatcatcactggccatcagagaaatgcaaatcaaaaccacaatgagataccatctcacaccagttagaatggcagtcattagaaagtcaggaaacaacagatgctagagaggatgtggagaaataggaacgcttttacactgttggtgggagagaaaattagttcaaccattgtggaagacagtgtggcgattcctcaaggatctagaactagaattaccatttgacccagcaatcccattactgggtatatacccaaaggattataaatcatgctactataaagacacatgcacatgtatgtttattgtggcactattcacaatagcaaagacttggaaccaacccaaatgtccatcaatgatagactggattaagcaaatgtggcacatatacaccatggaatactatgcagccataaaaaaggatgagttcatgtcctttgcagggacatggattaagctggaaaccatcattctcagcaaactagtcacaaggacagaaaaccaaacactgtatgttctcactcataggcaggacctgaccaatgagatcacttggacacagggagggaacatcacacactggggcctatcggggtgcggggctgggggagggatagcattaggagaaatacctaatgtaaatgatgagttgatgggtgcagcacaccaacaaggcacatgtatacctatgtatcaaacctgcatgttgtgcacatgtaccctagaacttaaagtataataattaaaaaaaacccaaaggcataaataagtaaatgtgtaaatgtgagatattgttatggaatttaactagtattcacctctgagtgttcattggtatctaccatgtgcgaagcacattatcaaatttgcattatgaaatttaaagcagaggaaaatgaggctcaaagaggtggggtagcttcctctgagcctcataccagcagctggcagagtctggttttcatgtcagctctgactgttaatacctgtgctttgagtcactaccttaaacttcctccattggagtgcatgcctacctcaatatgctataattttagggctatttgtctttctcccagacccaacaatgcattccaagagggcagtattcatgctttcttcttatatttcttgcattcagcaccatatatggaacataaaagaggttcaagaaatatctattgagtgtgtaacagcttggatgggtttgggaaattatctcttcttattcctaaaagtggagtaaatgacatttctaaacaattcaagatgctggaaatcccattgaattgaagctttatggcacagagtggatctggaagttttgtgcagaaaaatctctccacaagattttgtgtggagaatctctccaaccagtgtgggttagatctggtgttacctttgtttaagtcagtggaaggtgttaacatgcacatcctgcttgaccttgtcttccagggacaggaaaaaaaaaaccttgataactaaattgcacaacactcaaattgcacaaataggctcattgagaataagatgccagttgaataaagtaacttttattgtcttatcaaagaggttctctgagatagactctttcttttgctttgcagatgttttgagtacagagtctgtgaaggctgattgtaaatttcaacagtgttgactctctgagttcttgaattatgtaaaataagatgcaggaaatgatgatttaatcctgagtgaatcacattccaaatcctggattcccaagaggattaggcagttttccaccatacttaaacaaaaaaaaaatatagaagtgcagagagatgtagagatatgcctaaagtcacattgggagtcactgatgaagatggtctcaaattctcccatcaactgccccatcaagagtttgccaactgttgccatcctgcttgtgaggtcaaagcagttacataactttcatgtgctcactgagattattccttagctccctaagttaatgtaataggatgtgcaaatgcatccataaggtgcccatggaatgtggatggtccctttatctttcatcctttgcaaatttttgttgtgcagctacagcatggagctgtaggagacagtggtagaggttggcttgtggggagaaggtctgcattatgattattatttttatatttggttttgaaatttttaaaaatatgttttattttgaaataattttgggctcacaagaagttgcaaaaatagtatagagttcctatgtactcttcacttagtttcttccaatgatattgtcttacatcatcactatatattacctgaacaagaaaatggcattggtataataccattaactaaattacaagagaaggtctgtgttgatgacatgcatttatatgtggatgcaatcactaaattcttgctctgtaccagccccttttcatgcctatatcatttaaatccttgtaacaaccctatgaagcacatactatatttatcctcatgctactgatgaggagactgaggcacagagaggttaactaacctgcctatgtgaatgcagctagtaagtcgtggagtcagccaaaatcattccagatcctgtgcttttaatctttcttctctactgctgtattattccattttcacactgctgtaaataactgccagaggctggataatttataaagaaaagaggtttaattgactcacagctctgcatggctggggaagcctcaggaaacttagttatggtggaaggggaagcaggcatgtcttacatggtggcaggtaagagagagcatgtgaaagcacaggaaaaactaccatttataaaaccatcagatctcatgagaattcatttgctatcatgaacagtatggaggaaaccaccccgataatccagtaattttcccctcttgacacgtggggattacaattcgagatgagatttgggtggggacacagagccaaaccatatcaactgcctccaaattcaataataaaattccttagaagtggagactcagattatatatcctctaatattcccacagtaatttacagatggaaggggcttactacatgtttaggttttgttttgtatgtatgtagtgaatatataagcagaatcaatgaaatatgactagaatggtctctccctgctttcccagaacttattgttaagtctaagtcatgataactaggaatggcgtaatcagaaaaaaagaagaatgataaatacccacacattggttattggtcacagctcacagagaagtgtcttgacctacatttgagccatgtaagcagagaatgagttcactcttccagtctttgctgctgatattggagctagggagaaacctaattcatctctatcagggcacagatatctgctcactgggagctctagagtgcataagcttcaatagtggtaaactcacaaactatttgtgctgcatgtacttccataatgtctgtatttctttttgtttcctttgtgtttttcttctgtcagccataacacaaatgtgtggtccctaagcaaacatcaactaatggcaggcaacaggaggtcactcagaatggtgtttggggatggtgaattgagatagaagcaggaactaatataggataaatttgtttcagtttaacaaataactcctgtatatccacaatggggcagaccctttgctcaccacccagggtctaggagcccatggaatatgactctgactcccaggaagctcacatatgatgaaggtggttttgtagggagaaaaagcttttagacgtgggttcagatcttggtgtccttatctttcaccagctgattaacctcaggcaagtcttttaatctctccaattctccattttctcatctctaaagtgaggctaataatacctacattaaagatcaactatgataaattaaagaaggcagatgtaaaagaccacacactgtagggtttcgtttgtttgaaatatccagcaaaggcaaatatatggagacagatagtagattaatggttgtctggggctagggttgggaatagtgagtaacttttgtgcaaagtgtcttcttggggagatggacatgttctagaattggattttgatgatggttacatttctgcaagtttactaaaaatgattgaattgtgcacttaaaatgagtgaattttatatgtacatcatacttcaataaagctgtctttataaaaagtatcaattttgaggctcacatgagatgattaattggcctcatataaggcattgtgacatactgtatatgtgtgtgttgttattagtatttttaacattgaaaattaatgttaaaaatactaataacaacactcacatatacagtatgtcccaaatgtccaacaatgatagactggattaagaaaatgtggcacatatacaccgtggaatactatgcagccataaaaaatgatgaattcatgtcctttgtagggacatggatgaagatggaagccatcattctcagcaaactatcgcaaggacaaataaccaaacaccacatgttctcacttataggtgggacttgaacgatgagaacacatgcacacaggaaggggaacatcacacactggggcctgttgtggggtggagggagaggggagggatagcatttggagatatacctaatgttaaatgacgagttactgggtgcagcacaccaacatggcacatgtatacatatgtaactaactggcacgttgtgcacatgtaccctaaaacttaaagtagaataaaaaaaaaaaagaaaattgactgtttcctgtggctgactgcacacaagaaatgttgccaggaaagagctattgcaccaggttggtagcctgcccatctagcagacagcattgtagtaattctcaaggtctcctagaaggtttcttgaaggtgggagttatctttggatctgtgtccccctagggtcctgcagaaatttctgcttccagaaatggtgagttgttttgctgtagaccaatcctcctaccaagaataactggaaaagctggataaaatatatttttaaaaatgtttgaaggtattatcaagctaccaaggaagtgagggcttgagtgtggccacgtattagtccgttttcatgctgctgataaagacatatccgagactgagtgatttctaaagaaaaagaggtttaatggactcatagttccatgtggctggggaggcctcacaatcacggtggaaggtgaagggcacgtcttacattcttacatggtggcagacaagagagaatgagagaaccaaatgaaaggggttttcccttataaaaccatcagatcttatgagacttattcactaccatgagaacagtatgggggaagccaaccccatgattcaattatctcctactgggtccctcccacaacatgagggaattatgggagctacaattcaagatgagatttggggggtggggcacagccaaaccatatcaggccatgactccagaaagaaaggaggcacagaggaaagagcccaaagttcaatactgcatttcctctcaagacacttgctaattccaaaatggcggctgagagactaagaagctgaatagaacttcctgcatgtcatgttgctgagggacaaatgttggtgctcaagttccatcaagcagaaggggaccttggtaaatatcaatgtgtccagtagggactctgaggggctacactctgagagtaagggtaaactagaaatagaccagtgcttataaaaatgaagtccagtatcaaatctgctcaatccttgattgaattagtgttattttcctcttttctaactgcttgccagaaggaaaatttaaatcctctgtggagaaagataacatcatccagaaacacaaattatctcctcaaatttttatgcacaattttaagaattcaataaaaagttaccagaaatattaggacataaaatgacatgactgaaaaccaggagcaaaaatcagaccctgaagagatccagatatttgagtttattaaacatggacttgatcttcttttatcataatttaatttattcttaattcttgtgttctgggattttccagaattgggagctatctcctcaactcgtctaggtttaatctgggttttttaaagcaacactattgaggtatagtaaattatactcatatatagttggataagttttggcacgtgcatacacgtttataaatgctaccacaatgaagaaacagaacttctaatcacctcaaaatgttctctcattccctgtgcaatcacttcatcctcctagacccatcaactacttatctgtcttctatcactatagattactttacattttctggaatttcatataaattgcttcatacagtatatactcttttgcatctggcttctttcattcagcattatgctgttgaaatacatccatgttgttgtatttatcagtagtttgttatttttaattgctgtattttattataagacatgaactttaattaatatgattaagatatataagacattagatgactagatagagaattacagcagagatctagaaattataaaaaagtcaaatgaatatttcagaactgaaaaattcaaaaactgaaatgaagaattcaatacgtgggtttaatagaagatcagacacacttgaagagagaattagtgaactagcggaaggattagaagaaaatacccagattgaaacaaaaagtagagggaaagatggaaaatactgaaaagaatgtgtgcaactcatataggacccattgaaaaggtctttttgattgagattccagagggagaggagaggaagaaggaagagaagcaaaatttgaagagatagtgatcaagaattttccaaaagagacaaaagacatcaagctttggcttcaaggagtgccttgaaccccaaacaagatgaatgcaaaggaaaccacatccacaaacatcttcataaaactgctaaacccagtgccttgaaatgaatttctggttaatgcagggctcctagcttttgttcattacattaatgcacatatgaatgaatgaatgaacaaaagaatgaaagaaagcaaggagagaaggaagaataaaaagatgaatcatggagcctggctttctatccaagaattgccagatatttcaagttgtttcctaggaagcagaatctgagaaagaaatgagcatatcagaaggttgttagggaacactgttggaatcaacaacaaggggagtaaaggaagcaaggttgggcagaaggagaagttgggctgtgatacagtctcagtaaagacctcatccaacctcacagtgtgctcaggagctgagctggcaatgcagagttgttctgaattgggacaaaaggcacaggtctttatatgacctcactgaccagtatttagtagtgggctgaccccaaggagagagtgattttgggcaaggctgttttctttagtcaagggcaggtacttggaagggatatctggatggtgcctcacatctccagagaaaagagcaggcataggaacccagcatcccaagttctgtagccttctgaagttatttagttattgaacagccatgcgaaataacttaaactctcaaatatgtgaatggggaaaatgcaattcctcataggccttgtgggctggacagctacttatagtgacttttgctgatctttttcttctctttttttccaaattgattgattgagtcatcattatttaaatatttataaaaatattttcaatttactaggcactaaaagttccttctttttaaaatctgttttttttttttttcgagacagggtctcactctgtcacccaggctaaagtgcagtgggtggcatgattatggctcactgcagcctcaacctctcaggatcaagcaatcctcctcccacctcagccccccaagtatctgggactatgggcgtgtgccaccacacctagctaagttttgtgtttttttgtagtggtggggtttcaccatattgcccagggtggtctcgaacttctgggctcaagtgacccacctgtctcagcctcccaaagtgctgggatctgtttaaaatctgtatgtattatctgctgcataacaaattatcttaaaacttactggcttaacaagcaatacacatttattatcccacagcatctatgggtcagggattttggagcagcttggctgggcagttttggataagtgtccctcatatccagtcagtatgtcgcttggggctacagtctcatctgaaggcttgaccgaggccgaaaggatccacttccaggatgacacactcatatggatggcaagttggtgctggcttttggcaggagacctcagttcctctctacatgaatctttctattggtctccttgagtttccttatgacatgggagccctagtttcacaggagctagtcaccatcttttcacattgcattggctctcatctttgtcactaggtggacatagtaataagctgattgtgtcatagtcatgagcttactgaagactgaagacttggagatgggtaggtaatgggggctggtagcaaagaaaacaagcatttaacattggttggcagatgtcatccttcctcaaggtttgagctaatgggcaagatttaactcctgtgcctgagcttccccaacatctttaaagcactacacatttttctagacaaaagaggaatctgatgtgtgtgtgtgtgtgtgtgtgtgtgtgtgtgtgtgtgtgtgtaactgaagagagaagggaacatgcttcctcaggactctgagtgtgtcttaccaggagaagagagtgggtgctcacctctaccatcttacaaagattcttgctcccaaagtgggtagactagacaggagaacaccctaggggccaagggtaccctggatatctccagtgtggctgtggtgagaagagaagggacggcatcctaggtctctgaaagatagagcatggaatagattttcttttaagacagtttttttccctcaactgccatcattataatcaaattcagtccaagtcttagcacatcaaaaaagatgtcaggacaaaaaacagggagcaattctttccaggctcacatattaatagagagataacactcagagaatatcaaagtaaattccagaggcaatggtgacatttccagaacaaacattagttaaacacttatgaacaatcgtcaaaattatttcacaggcgtaaattaaaaggcagtcctgtaatgttgattcattttcctctccccaagtttccacagctgaatgcacaaaagtatgacagaaaactattaagggacctttctccacatggagatgtcaatggcctccccttttatcttctgttaggttcctttttcaaccagattcatcatttactcctaatagtgatattaaattcacattttatcagctaatgaactggagttctgaacagcccacccagggagatatggtccagaaagtttcagagcactttccatttagcccaaacaaatccaatcaattcttaattattcatttgtatccttccatgtatcttatccttagaataaactttctctagattttaggactcactccttatttaaattataaaaagtaatttatgcttattgcaacaaattaaaacaatacacaattatataaagtaaaaaggtcacattctgccaccagaatatgtccacttagaaaccagtctgggtacatcctttttaagtttttttctgtacatatagtagtgttctatttatttaaataatatgaaaatatgtcttattcttcaccttgcttattatcacctaccactatattaaatatattttttagtatcagtacatatatgtatatggcattaacaacatgtaatatttcatactgtggatgtaccatcatttatttatttgctaccctattttgctgaacttttcactgtctcagcaccacaatggcttgcatatagatctctgaacatcatgctaattgcttgagcttgcctcagaatacagagcctgaggcaaggatgaagagctaatacattacttgggaggtacaattcaagggcatggaaagtgaaggatggagaagcagggaaaaccgtgcaagatgatgcattaccacactggccaccacttcactgtgagccacaaagagacacagccagtccattagcagatacatcagctcatccacatgtgatgtccttaggataggctgtgcagagaaaccatgcttcaagaatagtccattgaagagaggaagggagagaaaatggatctgcccaactgctttttacatcctgtcttccagtgaccaaggttcaccccacagggcattaactctccctcacttacaggttgtgtcagctagcccatgtggcagtagctcacagaggccaaatcccatgccctgtggtctcatgtttcatctgagtccagtgcaggaggggccagagactctagaggtgccactgatcagcctcgggtggcaaaaccacatgggtcacatggagttggggtgcagggtgacaacttagacagggccagtagctgaaagtctgggactcagctgggtctgggactgaggctggggaattctggggaggccaatgggggagttgagtctgatatactactatttctatgtgatataacagaagtagaattgttaggtcaaaatgtatgtgcatatagagctttgatagattgcaacaaattgctttccagtgaggttacgtggaattacagccccactagggaagtatgagagagtcatttcctatactgttaccaactctggatactatcagtctttgtcaggatttgctagccgaagagctgaaaaatggttttgccttaatctgtctgtattagtctgttcccacactgatgtaaagttactaccagagactgggtaatttctaaagaaaagaggtttaattgacttgcagttccacatggctggggaagcctcaggaaacttacaatcatggcagaaggaaaaggggaagcaaggtacatctttccagggcagcaaaagagagagagcagggggaactgccacttaaaaaaccattaggtctggtgagcactcactcactatcaccagaacagaatgggggaaactgccaccatgatccaattgcctccctacatgtttctcccttgaaacctggattacaatttgaggtgagatttgggtggggacacagagccaaaccatagcactgccattattatagtgaggttcagaatttttttcataggtgtattggccactggtttttcttctgcaaattgcttatttgtgtatctcagaacaagttaaatttcatatttcctagcaaccttctgggttgcttttttaattttttcagggagtactaaggcatttagatattgttctggctgacctttgaaaaaggaaactttctggcaagaagaattgcatcatgccttccaaaggcaaacacaaacgtgatttaaattttttttattatgatgaaatatacataacataagatttaccttttttttttttttgagacggagacttgctctgtcgccaggctggagtggagtggtgcgatctcggctcactgaaatctccacctcctgggttcaagcaattcccctgcctcagcctcccgagtagctgggactacaggggtgcaccaccacgcccggctaattttttgtatttcagtagaaacgaggtttcaccatgttggccaggatggtcttgatctcctgacctcatgatccacccacctcagcctcccaaaagtgctgggattacaggcgtgagccactgcgcctggatgagatataccactttaaccattttttagagtacaggtctatggcatcaagtacattcacattgttgtgcaaccatcactaccatccacttccagaactttttcatctttcccaactgaaactctgtactcattaaacactaactcctcattccctcctccccatagtctctggcaaccaccatttgactttctgtctctatgaatttgactggactaggtacctcatttgagtggaatcatacaatatttgtccttttgtgactggcttatttcgtttagcataatgaactctagtctcatccatgttgtagcatgtgtcagaatttcctttctttttagggctgaaatcacaaaggtgattttaagttatcactggttagaattatctctacttctccagtagaataggagttccagaaatgattgttataagaggttcccagctgctacttgagtgctgagctcagctgtcatttctactcgggacctgttcttggccaatcatgaatcttggctcttgagtaccccagatgtccactcactttccccatcgtattccccaagaacataagctttctataatgtaaacataaccatgctacgtcccatccactcgtcaccctgctgactgatagcaggtaatctgcagtggatacacgtgtgtgtgtgtgtgtgtctgtgcgtgcatgtgccttttcaagtattgacaacatttcatgaagctcagatgcacaccttgatttgactgctttggaaactgtcttagatcccatatccaaccctggtcttgccacacccagtgtgactttctaagctttcttgagtaaattagaaccaatcaagcttcatccaggagctcccacttctcccagagttcatctcacaactcccaagcccacaggagtgctgagattaggaggaagagaggcaagagagatgattgtcatattcttttaaaaatgagaatcagaacatttttaagtcattgtcattactattttaggtttatagacaacaaatttttttagcaggagattattataacttttataaggacttaggtgatataatcttagacagtagcgtaaactatgcagcctgtacaaatcattgttattaaaaccagacatattttaaaaattagaattggcaacattgatgtattttttacacaatactatggtttattgcagaagtagtttcactagagttcttaataatatattgaaatatatatgtctccagggtttttctctctctttatctatctatatgtctgtctgtctgtctgtctctacctacctacctacttatacatgtattcggaatactgcgtgtgggggttttattttctaactgggatctgtttttttttttttttttgagacagggtctcactctgtcacccaggctggagtgcagtggtgcaatcatggctcactgcagccttgacctcctgggctcaattgatcctcccacctcagccttccaagtagctgggacacaggcacatgccaccatgccaggctaaatttttgtagagacgagatatcaccatgttgcccaggctggtcttgaacccttgacctcaagagatctgcctatctgcctgcctcagcttccaagagtgctgggattacagacgtgagccaccgtgcctggtcataactgggatcatttttaatggctgcatagtatctcacaatacaccctgtgtgttattactcattcttttattgtttgaaatttgggttgttttctgatttgggggcattttaaacaattctgttattctaaaacaatctgcccagcgacagagctttgcgagcatccgtgattatttccttaggtggcatttttagaagagtaatttctgtgtcataaagtgtgcttatttccaaggctattgaattatattgccaaattatcctataaaaatttcattgatttatactccctaaaatccaaaaatcttcttacccaggaggctgagtaatatctagaaagcatactcagaaaaaaatataaaaataagaaaacgatataagcagactccaagctgccgccatccagggtgtatctgggcgagtcatgcatgcgtccctgtgtctcagtttctcttttgtgcaaaaaggaagttgggtcagctcaggagttggcaagctttttccataaagggacaggtagtagatattgtaggttttgtgggccatatggcagtagttttcaactgggagtgattttccactcctagtgtctggaaacatttttggctgtcatagctggggagagaatgcagtggaatgccagtgggatgggaccagggatacagctcaatatcttacaatgcccagcaccatcctccaacatgaggaatcatccagccccaaacatcgctggtgccacccttgaaggacccttgagagccctgtcgtatggcctctgtcacgactactcaactctgccattgttgtacaaaagcagccacagacaacacaaaagtgagcaggtgcaactgtgttccaattaaactttgttgatggacactgagattagaatttcatataaattttccatgtcacaaaatatgattcttttaaaaatttttaggcaagccattaaaaatgtaaaaccattttaagattgcagccatacaaaaaataaaaaatacaggtggcaggctggatttggccttggtgccgtaagttagctgacctctgggttagttagattctaatgcttggagattctatgagctggggcaactgatattcttcatggagcactgattataggccaggcactgtacacggattctgatcttgtttcatttcacgtcaaccctgtggaacgttgttatccccattttaaagatgagaaacttgaggcccagagaggtgaaataatttgctcaatatctctcagcgacaaagtggctgagctgggatttgagccaggtgtggcccattctggagccagggtataaaatctataggccacctggttccaaaattgtatgacccttccccaagcctggatgtgtctgtctcaggttggggccaaggtgagaagtggagatgtggtgagggatagaccaaggggaatatgagtaagggaaggggctgctacctgtggacagaatatagtggggagactccctagctgtggacaacctcccagaattccctgtgcaccccaagtctaagctattaccccccaactgtgtacaagtctgtttccacagtgcttaaccctattcattagcccacccagagctccatgcaatttcccatggatgttttgccgcagaggcctcatgctgttcagtgtgggcccaaggtactttggctttcattggtcccttctccattaaaaaaggaaaaaggaaaaaattaaaaattatattttaaactatgttggtataaagatcatataatccatcctggaatcattttgccgtactcattattattttatttatttttttcttctgtttgtaaaataaatgaaaatgaaaggattttcatgggcacctatacatagggtgggccccaggcactgtgcctcaggtgccgatgagagaggccactctgattctattccccacagttctggaagcatgtaacagctgcaaagccctgcattctggagcaagtttctttattctctgagctgatatctccttgttttaaaaattataatagtgatgccttattaacccaaagtctggaggtgacgataaaatcatctgtggttttgtacatttgtttgcacatttctttgttcagtggatattttttcttaatcgaacagctactatatggctgatacctctctgggcactgcgtaagacacagccatgtcttcaaggaacccgtgggctaggcaagctcatattattggacaccattagacacttgagatactatttttggctctgctgtacagatgaagacactgagggtcagagaggttaagtactgttccctgtttgtaagcagcagagctggaattcaagccttaatcgtttgctccaatgccttgctgccttctctccacagtttggtaaaagcatccagtttcctcccctcaaggggtggttgtcttacagagctgagttgaccccatgtggggctccattcctgttggccgggctgcagtgctgaggaccggcaggtacctgagcagcaaggaaccgctgctcacgcttcagtggcactggggacaaccaagcctcttctgtaccctgactctgccctgctgtctccaaaagggcaccagtggtgtcagaaaccctgtgccctcctgtcacacctgtctgtcggcctcagatccgcagaacccccaggttaatctcctgtcagcaaaacacctggcactgtcacccctgctcatcaaggctgctccctgctcctctgtgcttccctctcctctcctctcctctcctctcctctcctctcctctcctttcctcccctctccgggaggtctgtggatgcaggcggggtggtggagcatgagctcagatagtgctgagctttttctgattccctcttggagattctcccactgctggagaaagggggcccatggaggcatgcagagtccagggttcccagctccagcgctggctgatgggatggagggcagtgcagactcggcagttcggaggctgcccagtttgggttcagttctggctttgcctcctaccagctgggcatctctctgggctcatttctttatttgcaaaatgcggaatagctatgtctctttccccatagtcacggagaagactagaggaggcctcacagcccttagcactttgaatgcatctaagttcttatccttaattcttattaggggaatttcctgtatatgcaaactagccttgccctaccttagtttaatgcaactaggtcttcgttagtgactgctctgagccagacaggtcctgggccaggcccaggggaggctgagatgaaccagacacgtcccttgcccttgaagagctcattgtcattgagctcaatgagccagtggacaaatcacactgcaggtgccccacagggacaagatcagctacacatggtcccatcacctacagaactccccagggactccagggaggtcagaagtctgcgatggcaagcaggagtctgcgtgggcagagagaatctttcagtggtctcttctctcctaagccagggaatctttttctccctcttcccagtcctgtgtttatttgtgactgtatcttcacagccgtcatcgttttcttcattgaggaaaacagggagagagggagagagaggagaaaggaagggagggaggaaagaagggatgaagggagggaaggaggaaggtaagggaaggagagagtaaggaaagaaggaagaagggaagggaggaagaaggggaggaagaaaggaagggaggcaggcagggagggaggaagggaaggaggagggaaggaagaagggaaagaagtagggaagaaagggagggaggaaggaaggaaggaggaaagaaggaaggaagaagggaagggaggaagaaggggaggaagaaaggaagggaggcagggaggcaggaaggaaggaggggagggaggaaggaaggaggggatggaggaaggaaggagaggagggagggaggaaggaggggagggagggaggaaggaggggagggagggaggaaggaggggagggagggaggaaggagaggagggagggaggaaggaggggagggagggaggaaggaggggagggagggaggaaggaaggaaaggaggaaggaagaaagtagggaaggaaggaagaagaaagggaagggaaggaggaggggagagggaggaagggagggaggaaagataagcaatttgaaagtcattaggagtcaatcactaaggaaactgtctatatctgcttgaatatcagggccttaatgctgtatttaaactttttaactgttgaactttcacctatccattcctgcatgccaggtaagccctgtcctaagcactctgcaagcatctaatcacagcatttcctatcagccatggtcaccaccctgggatgtaacacttaagaagagcccttcttccttttatgggtgaatcttcctctctctggtcccattgtttctttctttggtttctttttctcgtttctggaatctaactgaggcataaaataagccgtttgttcatctcccacttataagtgagaacacgctgtgtttggttttctcttcctgcgttagtttgctgaggataatcgtttccagatttatccatgtccctgcaaaggtcatgatctcattcctttttatggctgcatagtattccgtggtgtatatataccacattttctttacccagtctatcattgatgggcatttgggttgattccatgtctttgctattgtgaatagtgctgcaatgaacttacatgtacatttatctttgtaatagaatgatttctattcctttgggtatataccaagtaatgggattgctgggtcatggacacaggaaggggaacaacacatactggggcctgtcaggggagggtggggaagcagagagaacattaggaaaaatagctaatgcatgctaggcttaatacctaggtgatgggttgataggtgtagcaaaccaccatggcacacatttacctatgtaacaagcctgtacatcctgcacatgtagcctggaacttaaaaaataaaataaaaattatgtaatgaacaaaattaatttagctcagtatatcctccctcctgttgaggttggacattcgtggtctttgcagcaacattggaggagccttaatgaacctaagagccttcctgggttggagagagtgtccttaacacctgtgccaatgagctggtcacagccacactcatttaaactcaggatgcccatatctgtccatccacagacacttgggagaaccttagaacaccccattcctcacagaggccaaaatcccctgagagcccagtgaattcattccatctcttctttagaaaaagccacaaacatgattacaagaaagcacaagagattagaatccttggatatagactgcaaatattttttgcttggctcaggtaattcatttttcccctgaattagttgctaatatttaaaaattgagaaattttatataaaaatctgaatttctggcttctcttggaaaaagaatgagaaaatgcagtggccctggaccctcattcttgcttggccacaatgaactagagctgagcagcgggccacctctgtcagatgggtgcatagtttccaacttgctgcagtcccactcttcctgtagcatctccagtagtgaggcaaaatgccacataccaacctagcatgacatgcacactgcaatttttatatattatataaaagattatatatagttgaattaacatattcattaacaattacctgcatctctgcttctataaaaattaggaaaactgtgggtagatggagaggatccccctttatcatgaaaaaacttgcctttttattgtctaacttgtctgtttcatttttctaactcttaggcattgagatttcttacccttgctctaggacaaggagtagcaaaccgtgtggaaaacagtttggtgattcctcaaaaagttaaactttgaattaccatacaacacagcaatttcactcctaattcaattcttatgtacccaaacgaattgaaaacagattgtcttttcttttttctttttgatttggaaaggagagttttatttttcacaaagctttgcagccggcagggtggccattctgacatgctgggaagtgtagcctccagtcaaaagctggaaacagacacttcaagggagaagtaaagggaacaggaatttatgctgagtggggtggccgaatatacctattcaataagcttaggaggagtcatgaatatttatgaaaggagaactgtgcacatgtgcagctgagccgcatgccccttcaagggtcccatgtcaaaaaaatggcggtgtttgatctgaaggtagagtttttggccctctgatgtcaataagtgaagcagaagacatggaaaccccaatgtgcattctccatagaccaggcagaaccactccatggttggtgatctcttttcaggaagaaatgttagttggttgctttgttgaaattgcagaggtagggggcagcagccagatggttgatatcagcagtggagtctgaaagggctggtttctgtttagcccttagggaagaaagcctaagacagttagcaagccaggagttttaatgaggcgtgtctgacctcccatcctgtcctggctgagaactcagttttcaaggtttttttggggggtccccttggtcaagagggagtctgttcagttggttttggagagggttagaattttctttttatttctcattttgccccttttggccaagttttgccagaggcagcattgatggctaaacttctatttcatcccatatcattgctggggtggtgtggctgcctgccctgggtccttcctggcccttggtgggttccctatgaccaacggatttagagccaaaagactaacagccaatttaaacattccaggccagacaggaagggcggtgggcaggcactcatcaactctgaaaaccttttcagcaatgtaagagacaaaaatcaaagccaaaaacaaggttacaaagttgacttatctgtaagttctgtgcatagggctactgtaatcttggtttcagttagacttgtagcaattagctatataaaacattggctaaaatcacttaagctaaggaggttggagacttttgttgtgtaaggaagttagggatttttgttgtgctgcaatgctttttgaaatcactttagtaatttgtgctaaggtggctgaaaaatttcttatcatatttctatttgcataaatcccataacttgaaacaactatacccagaaggctctgtcaccaggtatcttgatatcctcttggtaattctcttaattctatggaaagtaggaatttttccatgattgagatggatggaaaagaggccacataatggccaaggaagcaaagttcctcaatttgccagctgtttaggcatctgtgtgcccatcctcgatttgcagactgaactaattctatcccttgaaaccagcccttacaatctcaacacccaccctttccaagacagttcctgggcctagagggagggtgcttctatatagttttagcaacagggctttggcaatgaaaaagagctcaggcccagtggggttccaaataagggaggtttgcaagctgcatcaaatcatttctagtcttcagaatgccataattctggggaaataggttttcaaacaaatacctatacgcaaatattcataggagcatattcataatagcaaaaaggtagaaacaacacaagtgctcatcaacagatgagtggataaacaaatggtgctgtgtgggtatgtgtatcacacaatgaaatattattcagccataaaaaggaatcaagtactgatacatgttacaatatcgataaacctcaaaaatactatacttagtaaaagaagtcagatgcaaaatgcctcatattatgtgattccacttaaatgaaatatcctgaatagtaaaatccatgtagacaggaagcagattggtaattccagggactgggagaagctggggtgggaggaatgaggaatgatcgcttagtgggtacagggtctccttaagggctgatgagatagtttggaactatacagaggtgatgtttgtgcaccactgtgaacgtgttaaaggcaatggaatcacacacttttaaatggttaattttattttatgtgaattttgcttcaattgaaaacaaaacaaaaaaaacctggcccactgcctgtttttatacagaccacaagctaagagtaggtttttacatttttaagtaagtggaaaaaaagcaaaagaagaatatctagtgacacaggaacattacatgaaattaaattttagtggccgtaaatgcagttttattggaaaacagccatgctcattcatttgcataccgcctatggctgcttgcatgtgatcacagcagagttgaatagttgggacggagactgtataggccgcaaagtctaaaatagttactatctggcactgtactgaaaatgtttgctgggcctagctctagatccttcccagccagatgatggaagtcaggtgggaattctggagagactggaaggttggcaggctcttgtctggaggcagagagttggacaaacaggctgcctttgatattaggtgtattggtctcctagggctaatgccaaaattactgcaaactgggtggcttaggacaacatttattctttcacagtcctggaggctagaagtccaaaaatcaagatgtaggcagggccatgctctctccgaaggctctagcggggggtccttccttgcctctcccagcttctggtggtggccagcatccttggcattcactggcttgtagatgcttcactccagtctctgcctccgtgatctcatagtgttctccctatctgtgttcccgcatcctcttccctctgtgtgggtctctgtgtccattttcccctgtgctgagaagtcttggattagggcccacacgaacccaggatggtatcatcttaacttgattatatctgcaaagaccctatttccaaataaagtcacatctggaggttccaggtgaatgtaaattttggggaaggacactatttaatctagtaattaggtaccccccccccaagatcttggattctaaacaagtaagcacagacaatttatgtcttgtcagatgcactcggaggctgagtagaaatgagcagagagagacaaatatcagctaagcacctactaagtgctaggcactgttctaagcacttggttgatcctatgaggaacttaagaacttgcccaaagttttatagctgacaagtagcagaactaggatgccaaccccagcaactagactccagatgctcatgtaatcctacagccaccaggcacggttgctacttaaattctcatactgcaggtaagtaagtaaacagtcttagagggggcaaaagactcatccaggggcaaagctgagatgtgacttcaggacagtaacctcgctctttccggaacataggagtccccagcccccactcgacccccatgcctttaccatttcttccttgcaagtacagagaacatcttttgcctgccctctccccagggtgatatctagggatgaaagaagctcacagatgcaaaaagagtcatctggaagctttgagtggggtttggaaaaccatgagctggctctaagcattcacccatgaaaacacctttcagcctttagagaatcaaggtcctattgacaaagtgcaaagatgttgacattcccttggaggctgtacttgctgcctgctccaaggtaagaggcatagatcaggcctgtgaatgtgcttctttaggagttcatcaatcctgcctttgttttgtacataagcgagaatgatcacattgaacaaatccatcattaggctgtgttcctttctacaagaataggaacgccaggtaaaggagacggagggcgtggtccagggacgcattcagagccaaactctgtggaaaatgggggcaggtgtcagagcacagtggctctgaaaacacgtctgattgcctctgcacccatccatcaggcctggattcgacacctcttcctttccccactgactatcaatcccatggcttttgaaaaacctgggaagattgcacgttaggatttggtttgctgactttgagaactggcaacctgggactgctttgtgaatttgttttcctcctggagggttgcaatcagaccgtctttgagcactggccctgagttcctttttgggctcagacccatttctcaatgattagccaggattggccattttgtccttaggtacaaggctgagtcactacagctgggagtggtggctgctctgagagcttgctggtcactcaaagaagacaatgagccatttgtctggtagaacctgtggcagcttgaccgacctgggagggctacaggagtgacaggcttaagcactgtagtacccaggcttgctccaggtctgaacaatattaggtgggatcttttgtgatatttccttgttccccgtctccttccgttgtctcccccaccatggtcaccgttcaacccacctgcttaataaatagttggcagtacagttaagagctttaagatattggagtcttcttcaatgatctccctccttcttgtgcattcttgatatgtttgatctagggcagtggttttcagtctggggaaatgttgcctctccacccccagggacatttggaaatgtttagagatatttttcttggtcacagcttagggaggacagtgcttctggcatctagtaggtaagaggccagggatgctgctgactgtcttacaatgcacaggacagcccccaccagagagaatggagtagccccaaatgtcaacagtgctgaggttgggaaattctcgatttaggtcagtggatctccaagttcagtcccaagaggagtgccattagtatcattcatcttctagaacttgttagaaatgcagattctttgtctcactgaatcagcaactctgcgggaggaatccagcaattgacgtattaacaacctatccttcccccaggaatctgatgcgtgaagtttgggaaccagtgacctggagtcattagtgctgttaagggccaagaggggcagttgcaggtgggggtctcattaaatggctgagatgcaactgactttggagtccagcttctcaatccctatcgtgtttccatcccatttgaagttgtgtcaaatcattaagttggcacacaagttattgcagtttttgccattatacaaatagctaacactcaacatcagtgcctcttatcagtctgagaggccaaatcattttctaggtaaattaaaacactggtaaatgactgttacaggtgagagcatgcctttgtttttttctggtggcgccttcccttgtggacttagtagattaaattgtttatttccaggaaaggtcagggaggactttatttgttttgattttcatgaaatattgaatcttattcacagatattaccagggcagacccatcacttcaggctgctaggtcacatacaggataaacagacttttttttttttcctgtgggaaattcctgaaaagaaagtagcaagaaattccttgcttctctgcaaagggcatgaatatactgttctcaaaataagatatacatatgaaaaaatgctcaacatcactaattatcagggaaatgcacatcaaaaccacaatgcaataccaccttactcctgcaagaatggccataataaaaaaattaaaaaataatagatgttggcatggatgtggtgaaaacggaacacttttatactgccagtgggaatgtaaactagtacaaccactagggaaaacagtaaggagattccttaaagaactaaaagtagaaccaccgtttgatccagcaatcccactagagaagtcattatatgaaaaagacacttacacatgcatgtttatagcagcacaattcgcaattgcaaaaatataaaaccaagccaaatgcccatcaatcaacaagtgggtaaagaaaatgtggtatacgtatatacaccatggaatactactcagccataaaaagaaatgaaataatggcatttgcagcaacctggatggagttggagaccattattctgagtgaagtaactcaggaatggaaaaccagctattgtatcttctcacttataagtgggatctaagctatggggatgcaaaggcataagaatgatataatggacgttggggacccagagggaatgggagggagctgagggataaaagactacacatggggtgcaatgtccactgcttgggtgatgggtgcaccaaattctagaaatcaccattaaagaacttatccatgtaaccaaaaaccacctgcccccaaaatatattgaaataaaaaaagagaaattccccactcctcgtgttgagaaagttactgaacttctctgatctgcggttttctctcctgtgaaataggagatagtcctgaaccctcaggttgctgtgaggatcctggacatagaacaccaggcatggaataggagcttgataaataaatgtccatttatgcatgttatttgaaagagttgggaagtattaggttggtgcaaaagtaatactaggttgatgcaaaagtaactggtgaatatttaatacttggctacgttggtttcctgttgctgctgccacaaattatcataaaatcagtggctgaaagcaacacaaacatattttttaatcattccggaggtcgtaattccaaaacaagtcttgtggggctgaaatcaggccattggcagggctgcttccttgtagaggctctccggaagaatgagcctctacatctttcccatcttccagaggcagcgcttcttccttggctcatggttttgcctcacattttctccctcttcttcctttgctcctcttgcctctctttcataaggatccttataattatatctcaggctcacctggataatccaggaggattccccatcacaagatcttttatgtaatcacatcttcaaagtcccttttgccatatgaagtattatgttggtgtgaaagtaattgcgatttttgccattactttcacacaaacctaataacagtcactgattccagcgattagcacctgcaatctttggcggggctggggcattattcagtctaccacagtgactaaagtcattagccactctgtaaataaactcctcaggtcaccaaggaagaaggattggctttggcccaagaattcagctgtctcttgtttgagacatctgctgcacaccactactacattgatgatattttccatgcccttgcacgggagatacgtaggaaagaaaaagaaggcagcactggccatggagaaaaaaatctaagcccaaaaacggtgtatggaagaggctaaaatcaccattccagaaaaagaaagattcagtaacttgaagggaagatatgaagtgtttatctgcgaaccacagtgctttgtcaaagcagtccagtaatgcagtgctttatcaaagctatagtgagaatggtgcttgctcttcctcctgttatgacccttattttagcagtaactgattagagggacatgcctactaggagattttaatgatgtggtctttaaagtattgtttcttagttaatcatgattcataaacccagtggggcattgtctatttttaaattgccacattagaatttgatctagcaatgttttgggttctgttgcgctgatgttaattaattaatgtaaatttgtttatacccaggagaatgtgtaaaataaatacgcaaataaataaataaatgactcgtttgtaggagacccaatagtgaaaaggccctgacactgtgtttcgctacgaggtgatgtctgggtaggtgttcgttggtgcgttatggcaggtgggaagtggcagacactacccattggttgtcagagtgagatgcctggtgatgtggtttggctgtgtccccacccaaatctcatcttgaattgtagcttccataattcccatgtgtcatgggagggacccggggagaggtgattgaatcatgggggcagatcattcccttgctgttctcttaatagtgaataagaatcatgagatctgatggttttataaagaggagttcccctacacacattctgtcttgcctgctgccatgtaagacgtgcctttcgccttccgccatgattgtgaggcctccccagccatgtggaactgtgattccatcaaacctctttttctgtataaattacccagtctcagatatgtctttattggcagcatgagaacagaggggaggggaggggaggggagggaagggaaaaaggaagggagggagggaaggaaaggaagggtaactggagaagctccaggggctcaactgatgtgtcagcccttctttcctatgtctttgcctgaagcaatcaccatggtcagaatgctgtggccttaccaagccttggtcaaacaccctcttctgagactggaagggactcagcctgctgtgggacattggaacggtagtttcccagtggaaaatcaggctgctgctactttcttcaaaagtaactgataagagggacaggcctactaggagattttaatgaggtggccttcaaagtattgtctgtcagttaattatgatgtattaacccagtgaagcactgtctgcttttaaatggtcacattagaatttgatctagcagggccgggcgcggtggctcacgcctgtaatcccagcactttgggaggccgaggcgggtggatcatgaggtcaggagctcgagaccatcctggctaacaaggtgaaaccccgtctctactaaaatacaaaaaattagccgggcgcggtggcgggcgcctgtagtcccagctactcaggaggctgaggcaggagaatggcgtgaacccgggaagcggagcttgcagtgagccgagattgcgccactgcagtccgcagtccggcctgggcaacagagcgagactccgtctcaaaaaaaaaaaaaaaaaaaaagaatttgatctagcaatgtttagggctttgtggcactggtgtgaattaattagtataaatttgtttatacccaggagaatatgtaaaataaataagtaaataaataaataaactcctttgtaggagacccaatagtgaaaaggccctgtcactgtgttggactacaaggtgatgtctagctaagtgttttgaagaaagaggagtgagctctgagcttgtgcgtgtgtccagagccatagagctctgtcccctggatgggctgggagggtcaagctctgcctctcctttcatggtgactgagcctgtttttagatctgtccatgcatttaatggattgtatcaggcgatggagatctaggtccttccctgtctttctgggcagggatttccagttaggcactgttgacatttggagctggacagtgttctgttggaggaagctgttctgttcgtttgtagcatccctggtctctacccagtagataccagtaccactcctccccctcaagttgtgacaacgaaaaatgtctgcacacattgccaaatgtcccctagggatcaacagggctcacgattgagaactgttgctctaggttaactttgtttatgtgttggggttgggctggtttaactcttgttgcgggggaattccttccttatctccaagttcttgggggtgtggggactctctgtatcctccttctactgataacacctctcactgataaaccatggccctgttgcagcagaggtatcctgccccagaggtctcactttcagggatgcaatcagcacctgtcacaaccctgtcgcctcagcaggcttcctggcctcacttgggatgcttcagaaagactggctttggaatatggacacccagtcttgaacttatatattatttatcacgaggctgtccccaccatgtctgcaagctacagacagtgtgacatctcttcggatggcactttaagtctcaggaaactgagagagaggcagtctattgcctgaagtccagagccccacgatgcctggtgtcttgggtttttgaaaacctggctggggtctttggcagcaagcttgtctggtctgtccccgagcagtccatccaggcagtaaattccacagaatggttctgtagggggaacttctcagcagccctttgttctgtggacaattaacttccgctgaacattaactagagagtggctacataatgagaaacatcatatttccatcaggggagaatttcagctcagacaactccgatggctctgatttaagatccataaactcagttcaaggcgataaatatgtaagtaattgatgatgtagtgtgtgaggaacttaagacccatccatcacacccaggcaggcaagtgctgtggacacgctctgagaacaggatgatagaaggggaataaatggtcagaaggacctagacagttctgtcctctgcataactcactgcagcttctctctacagtcatggcttctttcccaaaggagcctcttcccatattttgtcttctccagccaggaagagagacagctaagaaaagctaaaaacaagcagctgaattgctctaggggccatccgcctcttaatgcacacctactattgccaggtacctgcttcatttcccagtgtctgatcctcaggtaaaccctgcaagatggatttcattgcccccattttacagaggaggagatgcacagagggaaagagtcaggtgacagaacacacaagcacagagctagaattctgactcaggcccgcatctgtaaattaattccattttgcacattccaactcgggcaaaagagggggtttgtgtccccctagttgcctggacttgggaacatgcaatccacaaacaagtcttcaccagtttctgggtccaaatgtcaagcccaacttgcagattccaggctgtggtctgcgtgtctcccatctccccctgccctgcacctatcaagctactgctgtttctgttggtttatttcaacgtgaggccatttacaatggaaattgatggagcacagggctggctgtttttctcccttcgcagggacatttgtggtgatggcagtgtggggcctctgtcagctcttgttttgtcctcgtttaagtccgagccaggcaggggaagccagctttgaattagcattttcctttgggtcaaggagacagtcctgtatctatgtgggttgagatggctctgcaccgctagccaggccccatgcttctccaggtctccaagctgcctttgcacatgctcagggctgctctcctctttccagaccatgttcccctcctctttccagatcatagcggtaaaattatatcaaggggaaatttgaagggaaggtttgggggtggggccaggaaagggaagaaagataagttttcaaacatgtctcatctttagattcaaatgaagattgataattaatgacactcccctctctgatccatgggatgtgtcttgtgccccaccccccgattggccaccagtgtccccacaccccttgccctacccgacctagtgttaccatcttagattctccatccatcatccccacaaggaagataattactcctgtggcacccaggtctcccattgtttggttacaaggttaaaaatccctgacgcactttaataaattcagcagtgagcacattatgaaactgtaattaaatgcctcagccatcttttctttctttaccggcaatgaaacttaattgaggccatctgagaaaggctgaaataaatcacaggtgatgactctaggattcgcatttctcactgggagagggagggatgttatcactgtccacacatttgatttagagcaaattaaggggatcctagcttgatggttacctgccaggtctcagacaccaggtggtggtggtcttttcaaaaaggggaaagtgggccaggcacggtcgctcatgcctgtgatcccagcactttgggaggctgaagtgggaggatcacctgaggtcggcagttagagaccagcctggccaacatggtgaaaccccatctctactaaaaatacaaaaattagccagtcgtggttgtgggtacctgtaatcccagctactaaggaggctgaggcagaagaatcactagaacctgggaggcggaggttgcagtgagtggagattgctccattgcgctccagcctgggtgagtgagactccatctaaaaaaaaaaaaaaagttggggggaaagcgattttgagggtgagtatgtgaatattagaataaatacattaatatatcttcactagatcctgaaggtttttctagtttagtataaccttttttttttcgagacagaatctcactctgttgcccaggctggagtccagtggcacaatctcagctcactgcaacctccacctcctgagttccagcgattctcatgcctcagcctcccaagtagctgggattacaggcatgagccaccacaccctcctaacttttgtattctttttttagtagagatggagttttgccatgttggcgaggctggtcttgaactcctgacctcaagtgatccgctcacctctgcctcccaaagtgctgggattacggacgtgagccactgcatcattttttttttttttaagcaggggtgggaccaggtggaatgggtgatggaggagagtgatggtgacaactttcctgtgatgttgtccctcacatcctctccaatgtcctacctctagccgccacataccagcccttcatctgctttgctgccattggtgcagtgccctcaccactcactggtcctaccaatatcagctgctacctggagacactcctagcagggcatctcctatctctatctcatccgtcaccaccaccactgcctccaattgtaacttagagagaagactcccccaggtctcagctatgtcgtgccgctttatcagatgcaggggcatttcttcctcttctgcctgggatcagcatgttccttcccctggaggaagactcctccaggtcttctctctgctttgatagagtgacaactagaaaatcaaattctttaatccagacagaagcagtgagaggaaagagttaatttttcttttcctctgcccccatgagttgacccagatttcagaagttgcatgtagagacattgccccctcatggactattctacgaagagacagtgaggggttgaaagaacacagtcttgggctatcatcttgactgggctgcttgcatgtcctccttttctggctcttctcttctgcaaaacggggatcaaaacaatgcacctcacagggtgctaggattaagtgggcagtggggtgacaccaagtggttatacgtattttggcttggagactacagaccatttgtgtaaggattcctaccatgtaagtggcagaaggggatcttgaatcctggtcttctggctccatggaaaaaatctttctgctgattagccaagaaaatgagtttcacagctctaaatcaggacttggcacactttttctttaaagggccaggtaataattattttttgtttggtggaccatactgtctctgttacaactactcctgttgtcatagacagtgtgtcaatgagtgggtgtggctgtgtgccaattaaactttataaaattagacaatgagttgaatttggcctgagggtcaagtttgccaactctggcactaagtcatagtccgtacagagctttgtcatgttctaactgatgtgttaaattcaagaggcagagtgatgatgacagtgacaaaaacaataataacaatactacatcaggcacttggcagagcactgttccaattatatcaccccacttaatcctcctaccaatcttatgagggagatacaatgaccactttttttataggagaaaccgagcctcagaaaagtaagagtaccaagatcccatagctcgtaagtggcagagctggtgtttgtcacaggtgtgctcacgtcaaagccccatgctctctctcccacactgcactgggcaagttgattgcccttgaggcccttcctgttcagaaataaagtatgctactctgtctccagaggaggtccacactcaaggtcttgtctctaacttaaactccacacatgcatgaattgcattgaccctaatacttgcattcctgcagtggacaggaactgaggccatagtctcaatagcttagccattgcccattgttttgtctcaatgtcatgggagccccaggaaacttctctgaaatccctgtatatgatctcttccatcaagaatccttgctcacccctagcatctcttatcactgtcagtcccctctgccttatttcttccccgatgacatgaaaccaaagcccaccctggtctatgcactcaccagtttcaagggattccagggaagcctccatagccatcaagggccccagatgatgatgtttggatcttgggaggtgagttatcattgtttcagggagaaaattatgtccaactccatgaagaagcacttggccctgaagcatcatggagctgtaacctttagaaactgcacataattaaaatactttcagatctgatatatttgagttggatattaaagcaaatagagttatcctctgctatgtgaatgatatcatgagcagctttagtctaggattggttggcgccttggataaatcagtgggattttagctggtgactggcctgtgactccaaagaaaagtttaatgatctaagttttattagtttcagttacctttaggcccaatgaatttgctagttgatttgaatgcaacacctctgctgagttctcactcagtctgtcatgtccctgggctggaagcttaagggcagtttggaacttccagttcctttgtggtatttctgaggatgagctcttgggttcaaacctgagctttagcacctaaaagggaattatggagactaagtgaaataatacaactaaatcacataatctaggtcccactgggtaataggtgcttaataaaagttagctattatttttaataatattatgtgctcagaggtctttatctccatggaaacatttagggtagagtagctccttatttatccaacagggtttagcgattcaaagactgcaataaactatttcttgtggtccttttcaactctagactggcatggcttttaagataatttttacatttatctcagaaggggacatggtatggagctggatagaaggctttaattttataggaaactgggttcaactctagagttcatgatatttggtgaactttagctatatgactttgaacaatttagttatccttactttccttatctgtaaactatggatacaaactcataagattgtgtggattaaatgaagacatagctgcaagatacatacggtaaatatgtctgagcattgctctcatgctcagaatactctgtgtgcattatcccacttagtcttcaaacaacacaatgaggtacagtgggcactgatatttactcacagtttttgcctgagaacactgaagctcatggggttgtcacttgcccaaagacacacagcaggtcacatcccacatctacctcaatttgccatctgtgaaacagttataatgtgtactttcttccctaccacacagagtattttgaggataaataagttcagatttgctctgagtctgataaagttatctctacgatctctcagggccatgtaagtttctcattaatcagaaaaacaccaggttcagccaggacttgactatcggtccattcatttgttcattcattcatttgtccattaaacacacatttaatattcttagagcagatcctgagctcaacacttggggatacagtgacagatgagacccaggcccaaaccccaaaagctcccagcctagtatcgtttgtccccatagcagataaatcgcaaagaataattttttaaaactggctttgccttcttcccatggctacctttttatcctcccctgcttgggtttgggaatgcaaatcccatgaaaatttcttcaggaactgtcctctaagatcagtctatgccacagcagatattccagtgctacaagttggtaggtttgggacaaaacccttctttatggccaaggaagtaaaaatactctgttggcttctgaaaaataatacaggctgtggggccaatgagtacaccccctttgcttttcccagggacatggaggagtgatgggatgtggattttttatgaggggctgtgggtgggatcatgatagctccggtgggaaaggcctgtgctgggagaatgaccttgggaaggaatggtcttgtcagggttagagctgtagcattggacctgggtaggggttggggtgatggagcattgatgcagggatagggaggcggggaggccctccctgttttttccagttacagcctggcaggctattttcccctcgaccgccagagggagctcttaaatgcatactgcccagcacagcgtcctgctgcttccattctaacgcacatcggggctcccattgccttaaaacaaccccaacgttggtacggtttcattttcctcatggactcttatttcttggctcatttactttctgatttccccctgtagactctaaactcgggaaacatggttatctcgttcaccgtatccccttgaaaccatgcctggaacaagataggtgctgtgtcagtttcccatggctgctgtgacaaacggccaccaactcagcggctgaaaacaacacagatttattatcttacagttctggaggtcagaagtccgaaatggatgccaatgggattaagatcagggtgtcggcagagctggttccttctggaagctctaggggagaatccattctcgccttttctagttatgtgccttggctgctgtcccccctcctccttcaaaaccagcagttgcatccctctgacctcggctttcattgtcatgtccacttctctgacctctgactctcaccctcctccctccatcttataagggccctatggtgacattagttccacccgcgtaatccagggtaacttctccatctcaagatccttaacttgatcacgtcttcagcatctctttttgccagataagataacatactcccaggttccagggatcaggacgtgggcatcttttgggtgggagaggagcattatgctattacatcacttcccaggcctccttggtccttcccagacagaggtaggtaggaggccttggcagtataggatgggttgagcagggtgttggagggaactctggactaaaagcatccagtttgtttctgtctgcagtttaaatcccaactcagtcacttatcagctctagacaattgcatattgcttctaagcctcaatattcccatctgtgaaagggagatgaaattcacttccattaattgagccacagctcaattaaaaatccctgttctggcatttacttgcatttaccttgggcagtcgggataactttttaatttccttgttgaaatggcactaatgatcatggctgatacgctatgtgtgtgtatactctgtagtgtttgtattaatgggataatatatgtcaagggtctgtctgtttgacagtagtgcttggcacacggtaacacagcagacagcagatttactatatttttctttctttctttctttctttctttctttctttttctttcttttttcttttctttctttcttcttctttttttttttttcggagtttggctcttgttgcccaggctggagtgcaatggcgcgaccttggctcactgcaacctctgcctcccaggttcaagtgattctcctgcctcagcatcccgagtagctgggattaccggtgcccgccatatacaaaaataattttttgtatttttagtagagacagggtttcaccatgttggccaagctggtctcgaactcctgacctcaggtgatccacctgccttggcctcccaaagtattgtgattacaggtgtgagtcaccgcacccggccctatttttcttatttcttattttcttctttcttctcctcctcttcctttcctttatcgtcacccatttttacctgtgtctctgtgtatatcctcacgtatttttcccatgcctagctcatccgtcagggagctttcaaattcaccaggtcagagcctgatttttcatcaagaagctgtgtgtggtgtggatgctttgttaatgttggttcctgctgttgggccttctgtttgtccctctgactgctaaggtgattccaaagaccagggttcctggcttttccctcttctgtgcaaagccccttctgggcagatgcatttctcagaagacatcaacagcaagacctgtgcaaggggagaagaatcctccctccttccacctctttctctttctatgcactagaaatgaaaatatctacggagaaatgtctattattctactcctgagaccataggcaccagggatgcacaaaattctgcctctgtgtctgcatgacttgttatcagaaaattagagtagaaaagaagcttttgttcagctatggagacatcttaataggtgctttgattgttaagcagaagtttctgtatcggtttaattgctgtaaatgtcgtttgccttctctgttatgataaggcctggattttcatatattttttccccttccctttcaacagttttccattgctttaaggcttgcattggcaagtttaataaaatccaaacgaagaaagcaaagagaggatctcaaagttcaaatcttcttgcccacgtaggaagctgtgtggaggttattattgcttgagactaatgatgctgcagccacttaatgcaattgacagaattcaccccttcaaccagatattgggaaatgagaccaaactactaaacttaattacatctattttttgaagggagctgtaattgagaataactgaataactaggctatgaacctaatagtgagatgtgcttataataaaagaggatttgttctctgctgagttgagcctcagaagcaccatctgggggatttttgatggagaggtggtgataataagggagggagttggctagacaagcagagaagcatctagatcaggaattctctaccttgatgctattgacattttgggatgtttaattctttattatgggagtctgccctgtgcattataagatgttaaacagtatccctgctctctccccaccagatgctggtaacacacacacacgcacacacacacacagacacacacagtgtgacaaccaaaaatgtccccagacattgccagatatcccctagggggaagagcactcctctggttgagaacgggggtgcgggggctcctggaagactttcaaacaattgcagagttattcattgagaatctgcaggtgcctggctgtgtggcctttagcaagtcactgcacttctctgagctccttttgttttcctttgcacaacgggaataatgatagcctgaccacacagagggatagcttccaggtataaaatgcatagcataatccctagcacctactgagtaatcaacaaacttgatgtttctattataataatcttggattcagcaaacatgtattaagtactttgcttcaggcacgatgctttgaggtggtgatggaaagatgagatgtggttcctgctcttgcagaggtggaaaatgtatgtggacctgttggtacaatcttattcttcacccgtggcagacattgctaatcagtttcagtgccctttcctgttgagcctcagaatccattttaacacacttctttgggcagccactactagtggcccctgaaatgaaacccatttagcactcctagttttgtagatttccttgtgaggacgctaacccttcctctccagcgccatcctcccattcccacccacccctcgcactggagaaagcaccttaaggagttaatgggtggaatccctcctcccacatctgacttcagtccccaaaagagataggaatggaaagaatgctctcttaaaaatttttttttctcttgtcttttctatttccctcagaaatcgaaacaagtagtaaaatgtgcttgaggttgatgacatttagtttttagttaaactaaaggaatcccacgggctataattctgattgataaatcatgctgtctccctcttaggttttctctgccctttggggcttggaaaatcattagctctctcataaaggatcccagctttacaagggcagaattgggatttctggaaacagctttcagacggctgccgacggtgtcattagacagaatagaggagcgagtaggttgggggttaaatgctctgtgataggttctgacatgcccggctccccgaagagagtgccactccataacaattgctgtgaaaaatgaggcatgcatttgcagctccaaaaacagggagctggctccatccctctggcctgagaaatgagaacgggcgtgtagggtcaggcacttgcttcttctctccctgtcccctggagattccacaagcaggacgagttccttgctgccgttgtttcacagctctctggggcctgcaagctctgccaggaggatggtgtgggcaatgggcagtagggcggaggtgggacctggtgcacagggtctttgggagaaccagaactcagtctgtaatggagtgatagtacagttcgctgagatttagcctaagggatgaaagaagagaccagatggggacaggcatctcatctgaagtcatttttttgtttcttcctcattcccattcatcatgcatccacccacccacctgtctatccactcacctacccatctttccattcacccatccatccatccatccatccatccatccatccatccatccatccatccactcactcacccacccatccatctatccatccacccacccacccactcactcacccacccatccatctatctatccatccacccacccatctatccatctattcatccatccacccacttacccacccacctatccatccattcatccactcacccacccacctctccatctacccacccgtctatccatctatccatgcatccatccacttacccacccacctatccatctgtccatccatctactcacccacccgcctatccatccatcctatccatcctgctcatctatccactcatccacccacctacttactctagcataactttaggtggtacatgtttagacattattaaaataattatctataatatacagaaattgatatggctttctgcatagggtttgctttttaaaataagtgtacttaaacaaaaaaaaattggagtcagcctaaaatgttaaataaataacttggcagttgtacagaggcatggcagaaatgagaaaagcatcacttgcatggctggcactgggaatccactgcactctaactttcatgcaagggcacatgttcatttcaggttcctcgaacccaaaatcacagctgctgtgcggcttctaaggtatatgacctagagcaagtgacttcccctctccaagcctcagttttttcttctgtaaggtgaggacgctagcaacccctattcttgggtttgttttgagaatgtagcaagctaaggcatgcgaatcacttagcacatgcttggcacacaccaagcactccgtaaatggaagtgatgctcacttttattcattccacagctggcttcatttaaggcatcccctggcagccctgcccaggggcccttgcgtcagttgaggtgacaagctaaaccagtgttccacttggctttggtttagcaagtgatggcaactggtatccttcctgagggtgacgagccccccttttccttccaggccttgccagagcccaccccagtctctgaccctctgtgtaacaggctgttctcttctctctgtagacacactgtcagtgccacgctggtccccgcagatccctcgcagagatctcggcaactccatcaagcacaggtaggctggattcctgtgtgcactggtgcctacttctcagctctgtgaggggtgggggctctggcccctgccctggggtgagagaaggctaggctattgagctccagcacctacatcaccatgtccctttctcctctgctcggctaaactttaaagtggcaaccaggggactgagacatctgcttcttactaatctgacccttataaaattagcacatagcagttaaaagccagggctttggagtcagactgacctgtgttccaatcccagctagtaaagctttgcaaccttgaggaagttacttaacctttctgaggctcaattttttctttaggtaattctgcctacctatagggtgactgtgcagattaaatgagataatatttgtaaagtgcttagcacagggcctggcacataacaaacacttaataaacagtatcattctgaagattaatgctttatgtcctaatttttggtcttctcacccagaatacacaagactgcaggtgcacattctctggtgcggcgttcagtccagagctctagccctgctgggtgcatgagacaacctctccagggctatacctgcccttttagggaggggggtttgcatataccaggcatcccttataagaagtcctttaactccctgaattagctttccccattttgtcttggtagttgcagtttcctcacaaacttagcagggtgagtggggcaagtgtgctcatggccattggacagataggcagactgaggccctggaagattaagcgataggttgaaaagctaattagcctcagtactttgtgttcttttgacaccctgctgagttttcctagcaccagggcctctgtgaactcactggaggacctgttcccttattcatggattctttcctcttatatttccagagtttctgtgccatggttgcagctctgaccaagacataaggcctgttcccttggggagctcgtggtctaggggagggtcagatagttaacagaccatgacagtatggagagatcggggtgacaaggtgaggtgatatcaggggcagatgcatcaccatagctgggggcatggaggaggtgagcattctcacgatggggactcatggaatggcatctcatcaacagtttttgaaagaagtatgttgacaggatagttgttaagacttaaatgagaaaacgttggaggaagaagtgagaagtatgtgatagacacgtcaatggtcaggccttgagctgcagagagaaaggcatcaaagacaagggcctttttttgtattttcctcctcactgctctctggctctgctccaccccggtttggccacgccccttgatcaaccgtgccccctggactggccctgcccctggctcatccccattcttggattggctacgccccaggctcagccacgcccttggctcggccacacccctgggtcagccactcctctggctcagctcggcccctggattggccatgcccctggctcagccccaccccctagatcgtccagcccccaggctctctggtagtccctaagattcaaaagctgatgcccagaggagggaaacaacctattaattttaggaatgtcttcccagaggagctgagacttgggatgacctgctactcttcagtctctccctatgtttctccctgggcttaatgccaggaggtagagagaactggactcaccccagccttggtgaagaaatgaaattaaaatcccatctgctgccatcagagtcacttcagccagagctggggaagaggcagagctgatcccaagcacaagagaggtctggaaaggagaaaaaactgtcacccactgcttatgaagcctgcccgccactcctatgtggctggctgatgagtgaaatacacgctccttcgccgccattccccagagctgccaaattctgcaaaacagagtctgctaaactcactggctctgctgaagggaaagaaaggggcttgaccaactcacaaatccaaaaccagagagggagagttttcttggcagtaagtgtctttgctcagaatgttgctatttgcttagatttggaggctttgggctgtggcttattctgtttggagagtgactgacccaaatcaggcaaaacggtccagcagagggatgcaacctttccctcgaaattctcagactccaagttacataatcacttccgatttcccttttgacactctgaggcagtggagattagatataactcctgctgacggtgacacaaattgaaaattaaaattaacagtgacctggcaaccttcagtacttttcttgggcccagtcctgctgctgcctcatatctcttggggaagaaagcaccctggcaatatcgaggggagatgtgcccagggagttaatcgaatgcacctctgctccagttggtttatcgctgtacacaggagacctccaaactgctcaagtttgcagcaagtggatggggttggagagcgaggtgagctgatggtctgaatggctttcactttcaaggtttcttctctgccactaaggtttggggtctcagctctttcaggaggggagggctccctttgatactccccaggtgatatgaccggcaagtgatgggagatggttcagctggtcccccaggaggctccaccttgctttgtagctttctacaggcagttccagccctatccattgctctgtcccagaactgaccttggcatatagtaggccaccaggcaatatttgttgaacaaatgaatgacccttacgaaagttcaaggtaatagtatagtcacaacccaatttatcgagtgcttactatgtaccagccactgtacgaagcccttgacatgcctgaccttgtttaatctctccagcaacctatgaggtcaatactgttattatctggacttaacagatggggaaactgaggttccagtggtttaagcaacttgattaagtcacacagctcgaaagaaacaggactggaatccagggttcatgtgcttgctcttcaagtacttcatccctctagagataggtcagtcgccatttccttaaccttgaacattttctgtctcttttccacaggttttccaccaagtactggatgtctcagacgtgcacagtctgtgggaaagggatgctttttggcctcaagtgtaaaaactgcaagtaagtgactgtgccctgcagtgacttttcgcagcacccgatgtcagctagaaccatgcagggcactgaacagcctttgggagtttgatttcttcactcttgggagagttgtttgctttgtttttcagaaatagatttgaaatgcacctgtaagtttgggtagggggtcaagggagagcaattctgaataagaaccagagctaatggaagatcctggaaatgcctaatgctgtgtgctgaggcacagtgatacttctcgttttcataacatctaaggccaggggttggcaaattcttactcgagttgaccagatagtaaatattttaggctttgcagaccataagcagccgtaaacaatacagaaacagtcttgacaacttcatttattccaataaaactttatttgcaaaaacagactgcaggctggctgtggccctcagctgtaatttgctgatccctgagttagaatttgccaactccttttctctgtctctttttttttttttttttttttttgagatggagtcttgctctgtcacccagggtggagtgcagtggtgtgatcttggctcactgcaacctccacttcctgggttcaagcaattctcctgcctcagtctcctgagtagctgggactacaggcctgtgccaccatgctggctttttgttgttgttgttgtaattttagtagagactgggatttaccatgttggccaggctgctctcgaactcctgacctcaagtgatcctcccccgtcaggctcccaaagtgttgggattgcaggcgggagccaccgtgcctggctcccaagcctttctctcctttttctttctcctcatggtacctttttaaaccagccttgtaattatccccattttacagatgtgaaggctgagtctagcaatgaaaagtcactgtgaagaagtgacagtcaggacctgaacccagatccctaactccttttctgctcaccttctgtagtatcatattggtctggagttttgatgagaaggccgtaccacccaagctctgcctccccaagcttcctttctcttccacacccccattcaaggtcatggctagcaaaaggtagggaggaagaagaaaactgagacgccagatgtgggctccggagtcagactaagctggttttaaatcctggctctgctacttggcagctgcctgaccttgggcaagtcacttcacatttctgtccctagtattttcatctgtgtgaaaggaataataattgatatggtctggctgtgtccccacccaaatctcatcttgaattgcagctcccactattcccacatgttatgggagggacttggtgggagataattgaatcgtgggggtggtttcctccatactgtccatgtggtcgtgaataagtctcatgggatctgatggttttataaggggaaaccccttttgcttggttctctcattctcccttgccactgccatgtaagaagtgccttttgccttccaccgggattgtgaggcctccctagctgcttggaactgtgagtccattaaacctgtttttctttataaatcaccctgtcatgggtatgtctttatcagcagcataaaaacagactaatataataatcttgcctgccttgggtggcagtgagcatttgataaatcagcacacttgagaacataacacagtgcctcgctcagtccagtcctttgtaagaaattgcagtgccttgctatctggcctcaatctctccccctctctctctctctccttctgtaaacatgtattacgtaccccttcaggtccaatactataaaatagtaacagtcaactttatgtaatagttacaaatgaatgtgcatctgtttgctttatagaagtcatttagtttaaaagattctgagaactcctccttctgctctaggcttgctcttccttgtctagtccaggcagaggcctctcatttaggccctttcaggcctccccacatccctgccccaagatagaagtgagagaacggcaagggcaagctctcactctacccactctgccccacccctgtccatatcctccacctggcagtctcacctgagtaatgataaggttgagcatcctttcctcctggagttgtggggagccttaagccccagtggtataaagagaagtacaggccagatgcagagtctcatgcctgtaatctcagcactttgggaggctgaggcaggaggatcacttgagcccaggagtttgagaccagctttggcaacatcgtgagaaccccatccacacacacacacacaaataaataaaatttaaaaattagccaggcatgatggtacatgcctgttgtcctagctacttgggagtctggggcaggaagatcacttgaggacaggagttcaagatcagcctgggcaacagaactagaccctatctctacaaaataaattaaggtaaaaaattagccaggagtgatggcacataccgtggtcctagatacttgggaggctggggcaggaggatcacttgagcccaggagcttgaggttgcaatgagctgtgattgcaccactgcactccagcctaggcaacagagcaagaccctgtctcaaaaaaaaaaatttttttttaaggagaagcaggagcaataattaccaagcattagtacttcaaggccaccttccttgccttggtcctctgtgaacctaggctctcaggtggtctttctgacaacaaaaggcacaaggctgggcctttaggtctggcctccaggctgactgattttctccatacaccagcagctctgaagtctgaagatacagactcatctgtatctagtcccaccacattccgtgggggtaatggcaactcttacatcctcatacctgccgtgtggaggctttgaaggcaggtaattagatgacagggatgtagctggggtagtgaggctgaacacttcccaagccgttttaattttcagcactagaggcagaactcagaagtagcctttgctagtgctctctgttctaaaagtcatgagcaaagccttaggccctgccaagggttgggagaggaggttgtgggaaggatagggatagggtgggggggtaagcttcaagaacacagactttggaagcagtcagaactgagtttgggtcccagctccattactaaactcttgtgtgagcttaagcagaggtgtgccatcatagggctcagtgtctctctctacaacacaagtgtgacattagtgcccaccacagggctgttggaaggagtcaattaaatgtccatgctccagatggcaatgttttatcagagaacattcttccctattccatcttgtgcaaaaatgactcctggcatataagagacaaaattcaaaaccaaaaattcaaaacatgaagatctgacatgcttcaggagttttgacatggtgcttgcagaaactacaacagaattgagagctatctccagtacataattatgagcatgcattgctaatatcaccagttgaagttgagacgtgttctacaactaaattcctgcagtttttgcattagttatagtgaggatagagggttatttatatgtgttttcaaagattggcagaattttggatgcacttatgagctgatagaagagttggatgagggctagaaatgggaaatgtacagaccccactgtcaaggagtttacaggagacacacctatggaaactgaatgtcaataaaatgaaagtgtacacataaagagccgtgacaggtgacatttcagagaggtgacaccaaggatggggaggcagcttcttgtagaaaatgagcggaaccgtttgttcacttattcaactaatatttattgagcacctgttatatatacaccatgcacaactctagatgctggggaaacaagagtgaataaaagagacaaaatcccttccctagtttctatgctggggcatgggtaggagttgggcagacagtaagtaaattagtaaattaggtcatatgataagatgatgcaaaatgctaagaaggtggacaaagcagagaaggatcaggatgggggctgcagtttcaattcaagtggtgagggatggtctcatacctgagtgagaactttgcaaaagtagtagtgtgtgatctgggtcatttcctgtcctctgaaagcccttcccgaagcctggatttgatccttccctggagggagtgatttttttttttttttttttttcacccagagcaaatccagttctgttactgccagaaactccctgggtgacagggattggactggcctcatgctattctacacatggtccctggaccagcaccatcagcgtcacctgacacctggctagaaatgcacattcttggggcccactccagacctgccaaatcagaatttgcattttaagatggtcttaaatgcaatggctgtgttcccacccaaatctcatcttgaattgtagctcccataattcccacgtgttgtgggagggacccggcaggagataattgaatcatggtggccatttcctgcatgctgtccttgtggtagtgaataagtctcaagagatctgatggttttatgaggggaaacccctttcgcttgattttcttcattctctcttgtcgcggcctttgggtttccaccatgattatgaggcctccccagccacatggaactgtgagtccgttaaacttctttttctttataaattacccagtctcagggatgtctttatcggcagcatgaaagcaggctgatacagtcctagtgattcttttgcacattaaagtttgagaaacacttctctaggtgatctccaaatttctttcctgagctacttttcattttctagataatggttctcaaacttgagtgtgcacaagaatcccctggagggtttattaaaaagaaaaaaaaaaacagttttctgggctccactcctagaatctcaggttcaatacctctggggcagactcctagaatgtctatttctatcaagttcccaggccatgctgaggctgctggcccttggaccccagtttgcaaaccaccactctacattagaagtagtggtttaaaaaacaaaatcaagctttattgcccagcgggacatttcataatgtgagatgtttgtgtaagtctttgctgatggtttttcaggctcttctgttcttacacgctttagcttcactctatagataggaatctttttcatcatcatctccccagcaaattcatccagtaaatattggtgtgatgagaccaaatgataacgtgtgattaggagccaggcacggtggctcatgcctgtaatcccagcactttgggtggctgaagcgggtggatcatttgaggtcaggagttcgagaccagcctggccaacatggtgaaaccccatctccactaaaaatacaaaaaattagccgagtttggtgatgggcgcctgtaatccccgctactcaggaggctgaggcaggagaatcacttgaacctaggaggtggaggttgcagtgagccaacattgcactactgcactccagcctgggtgacagagtgagaccctatctcaaaaaaaaaaaaaaaaaaaaaagataacatgtgataggaacacaggctgccggtcagacacgcctatctttgaaccctgactctgctgccaactggttgtgtggctccctggagtatcagttgttttgtagaagggggataataatatccaccttactagattgcttaatgacaacgacaacgacaacaaaaaacaggtaaggtaattgttcaatgacgtgttcatccttgtacccagtccattagaagtgtttaattaatgtaagctaatgctgttactaactttatgaattaactttggggtaccctccacccaggaagccagaaacatctccttcatgtctaacccccttccctcctgctccgatttaatgcccacttcctccggaattatcattagctgtcttgttggcattctgaatagagagattaatgaactaataggaaattaagactccgaaagcaatttgcagttatctaaattgaggcgttttcatctaataggttcatgagagcggaatggagtttagctctgagtgtagaatgtcagcacaattcacatattgtctgataactggattcagctggcagaagtttgcttttgcagtaagatgctgatggatttcccagccttcaatcatgtgtcatctgcattcttcccccttctcagggtccttccacaaatttctgcagagctaagatctggttccttggaaacctctctacccctatctgcatttcttgcaggaaaatgcacaacgtgatttgggtgacacctgctctagaaaatgagagtttaaacagaggtgctttttcctttttcttttctctttttttttttttttttaatgggctggagtgtggaagagaggggaacatcttccaaaaccaccagtggataagtagcatttcaactgtctcctatgcttgttttagctacccattttctcttctcagattatgttttggttctggttagttcagccatctctgagcatgtggggattctttgctgccactcggggtatgagggtgaaaaagaaaaacttgtcctcgagatgctcacagtcactgtcagttctcaaggtgtgccctggccccacctatctcgggatcaaggtgcaagcttaacattgccacttcctgagcccgtctgcagatttcctggaccaggctctgagcataaggcctagaaacgtgcattttactaagcatcccagatacttcgtatttgtacttaagtgtggaagtgctgtggtgctacatcaaggtcgggtggatgcagtaatgcacatcagggtactctgctggaggaccttgaagctaagtcttgaaggaagaggagttagccaggcgaagcagcgtcagggtgctctgggccgaggaaacagcctgagcaaaagcttggactgggacgttaaaggccttgagcatattttgcaattgtttgcaccaggcagggactgggggagagcggagatgggttctgctttgcagcttcagggtgggccagttattgccatgattcaggctgctgctacctgaggctccaggcagggataggatgggggtgggaggcgttgctcagtgcccagccagacccactcctagaaaagcgatcttggactcaggctctcatcatcccaagagtgagttgtttgccaaggacaggaccatggggaggagcatgctggtgtcaagatcacccttcctgtgggtggcagagtgaggaacacacactaggaattgtgatattctccgagtcacctgctctcagggccttagattcgaagggtctgatcaactaagggatttcagagtacttcatagatgcttgagccttattcttccctaggaccaaggagcgctcactcctctgctttgaagacaggatgttattataaactcagtggccagcggtcacagtcttacatcacccacttccatcttgtgttctgatcagatttccagtgatctctttgaccagccactgctacagaggctgcagcaaatggctcgtaccttgcagctgcctcacccaggtacctgagactaagcccctcccccttccccaggtggttcagagccagtgactacctttttcaggggtgcaaaatcccagcctccttaccttgagacaaatagattttatggtacagtttttcctgcagaaatccccatgggatgaggctgagactggattcacctgaaaccacatccatgcctggcttctccctactcccaaccttgcttcctccacaatggaataggtttctttttttcttttttgagacagagtctcactctgttgcccaggatggagtacagaggcatgatctcggcccactgcagcctcgaccacccggattcaagcaattctcccgcctccgcctcctgagtagctgggattacaagtgcccaccaccatgtccggctaatttttgtatttttagtagagacagggtttcactatgttggccaggctggtctcaaactcctggcctcaagtgatctgcctgcttcggctccccaaagtgctgggattacaggcatgagccaccgtgcctggctggaataggtttcttctgagcatactccctcaataaatcatttgcaagaatattcatttcaggatctgcttctacaaaactcaacttatgacagtgaaacaacagcaaggatacagactgcagagagagagctgagttcaggtcctggccctgccactccctcgctgtgtgactctaggaaggtttctaaacctctctgatacacagtgaggctaacacattcattccatgtgatgagatatgttcatgccccgataataatgacttgagaattctttcaaattagaatctttaaatacgttgttcagcatttatttcgttgcaaaacccgactttatatgaatgcaaagtataaaaagaaacagacccactaaatcgcttccatgggttgaagcaacatcgaagttctggaaaattttagcccattttcgccttttctgtagttcttgttctctgcttttccttcagaattttctgaatcagccaacttcttggaagacatgttatagggtttatttcagtttttctcaaccttggcactattggcatttggggccagataattctttgttgtgggggctgtcctgtcgttggaggatgtttaacaccatctacagtttctacccactagatgccagtagcaccccctcctcactcccagttgtgaccatcaaaaacgtctgcagatggctcaagcctgtaatcccagcactttgggaggccgaggcgggcggatcacaaggtcaggagattgagaccatcctggctaacacagtgaaaccccgtctctactgaaaatacaaaaaattagccgggcgcggtggcaggcgcctgtagtcccagctactggggaggctgaggcaggagaatggcgtgaacctgggaggcggagcttgcagtgagccgggatcacgccactgcactccagcctgggcaacagagcgagaccctgtctcaaaaaaaaaaaaaaaagtctgcagacattgccaaatgttccctgggggtccaaactgcccccaggagagagctactcattcctaagccatggggctatggtgtgcattattcagttttagaatgtgaacttgcagttgcttgacctgtgcttggactcattactcaaacagtcaacttatagggtgaatccttatatgtatttcaggttatagggtgaactacagggtgatccactctatagttatagggtgatataggcattataatccctattatacaagggggtgatcaaccatcccagtttgcctgggactttctgaggtttagcactgagattcccaagtgcctagaaacccttcggtcaggcctaggttagccaccttacaatagacgtaggtctttactaactaaagacattttatatgttcctatgttccagttgaggttactgcccacttctgtaggagtgagacccatgttcgttcccctagtaaggtaagacatggtgtttggaagcctgagttaaccagcacaagatttccagtgtatttcagtggtgttttcatggcctttatacgagtcctctttcctcctgcctgcagtggctggccagacatgcttgtacctacttctttttatgtaaacagtcactttaataatttttacttaaataagccatgcacttctcaattgacttttgccgtgttagtggatcttttcacttgggtttgtacacatcaaaatccaagtgaaaatgtcaaataacacagcaaaaccaagcacatcttgattttctctcttgccctgtgcattctgctctcctatgttcttgcaacaaaatatattttacctaaaaatgtccaatttttttgcaaaatcgctgcagccacaggtgatgaggagataaaagtgtgaagtaagccatggctggtttgagccaccattgcactaatttacccagaccttaaaaagtggggaaatgatgagtgctgatgtcgcagctgctgcgaagttcctggaagctttgggagtttgtacaacaggcaggatattggcaggatataattatgagcaagtatttcagagatcaccagcttgaatcttgaacttacttttctattaatagaaacacttcagtttttgcaataattataatgggagttaatcatcctatatatgcgtttttacctatgataagcaaaaatttaggtctaattatagttgtatctgagggatgcttataattctactgggggctgaggtgggattagatgtgataatgatgatgataattatgatgatgctatcatgtattgggggctcacccaggtgccagacattttgctaaacactttacatgcatgatctcatttaatccttgccacaactatggaaagtagggtctattattacccccattttacagacgaggaaacagaggccttcagaagtaaacagccggctcgaagtgtcacggtgtgtggatctgttactcaaacccactgatcgctcagattcaagatcccagacttttaaccgctttacacgggcaaagggctggctacacagcaggccggcaataaatgctacatgtcactctgcttgccctttaactaaacaagcagaacagagtataagaatttggtctcaattccaacctggaccaaagcttttcctcatccctcccccagcctgccacatgctcccatcatcctttcttgaattgaaagatgacaaatggatctttgtgttctgatgaacacctctgggttcagagagccaagaagactctacagtcgctttcttctttttcagggaaggcgagggagaggagaggagggagggtacagcaagtaatacatttacagcttcccttacagtgtccttttatggagagaaaagtgctgggggttcctggtgatttttcatgatgtccttggagcccgaggtctgatttatatgtcaatacttcctaccgccctttgctcatttgtattgtggttagctataggctaaagagctagaccccactgagttgttagcagtgagggaaagggtgttttgatatcctgtacttggagcatacggaggcatttctagaagcactggctcaaacaagagaccacaggggaactcacatgagaccagaatgctcagttggtatgcagtgaacctgcacttttggttttgatatcctgcacttggagcgtacggagtcatttctagaagcattggctcaaacaagagaccacaggggaactcacatgagaccagaatgctcagttggggtatgcagtgaaccaagccctgctgcaaagggggcaaggattcggtttcgtgatttttttttttttttttgcgagaagccttcaggaacacttaatgcagtgacctggaaaaggaaagcaggtacagagagtagggaagataatgagaggggaactttgctgccctttaattgcaagtttctgctgccagagggtgtcttttcaaaatgcttagccagcattcccctccctgtttaaaatccttcattagctcccccttgctctcggcgaaatccaacttcatgacgagaccgtgcgccatgtttgcttactcctctgtcccctcgcatctctcccctcttcatgcccagagctgcagcttctccgagccatcaatccccgtggcaggtcatgtgcccactcactgacatgtctttgcaccccattgctactgcctggatctttcttgcacacctctgctggctctcatttatctttcaagctcagctcagccaccacttccctccgggaagccttccctgactcccctcaaatctgaagtgccaccttctgcccttttctgtcacaccatattacatactactatgttttatttgtctatttacctgcctgtcttcctgaccagactttaaactctttgaaggcagggccatctcatttctggacggttcactgtttaaacctctagcgccagcacagtgcttggcacacatggtaaatgctcagtaaatacttgttgcttgagtagatctcagtagggacctctgcagagagagcggttcttgacaatataagctccccaaatctggttcaaatccagctgggctcatttataagaggcaatttgggcgcagtaggatgagtagagagatgttcatgcttgaagccacaagagatgggtttacattcttggacagtaaatttcttgctagactgcaagatctttaaagaaagaattcttgtcttatttaattattatacctccagtgcctagcatagcccttggcacagaggaggaacacagtgtcttcttgtgggcatgcagggatgaattgtcccaattctgcccatcactatctgaatgactgagcttgttactggaccccagtcttcttgacttaaaaatgggtatacatggaatactatgcagccatacaaaagaacgagatcatgtcctttgcacgaacatggatggagctggaggccatcatccttagcaaactaatgcgggaacagaaaaccaaataccacatgttctcacttataagtgggagctaaatgatgagaacacatagacagaaagaggggggcaggccaggcgcagtggctcacgcctgtaatcccagcactttgggaggccaaggtaggcagatcacgtgaggtcaggagtttgagaccatcctggccaacatggtgaaaccctgtctctacaaaaaataccaaaattagccaggcgtggtggcgcactcctgtaatcccagctactcaggaggctgaggcaggagagtcactcgaactgggggcggaagttgcagtgagctgagattgcaccactgcgcttcagcctggggacaatagacatggcggcctacttgagcaaggagggtgggaggagggagaggttgcaaaaaaaaaaaataactactgggtactaggcttagtacctgggtgatgaaataatctgtacaacaaatccccgtggcacgacatgagtttacctatgtaacaaacctgtacgtgtccccctgaacctaaaataaaagtgaaaaagcaaaagaaaatactggggggaaaagtaacagttaaaaagagtcttaaacttcaagtcttaaacttgattgcagtctgaaacttgaattgaggttttaaagccatgcacatagaagacttagaattatatatcacatgattacacatgactacacaatggggccacatcaatgaggatttatcacttctgttttctgaagaatgaatgagcaaaatgaatgtattagatctgcagtgagagtaaacaaacagataagttatctccaacagaatctaataagggttaaaatatatgtaaaacatttcacacagtttatctcacatggtaaagggaaataattattattcctattctcattgtcaatattgtgattccatagccatatataaactgatatccactattttattaacaaaagtaagccaacaaaagctagatgttcagtacttttcacatattacatgggtgtaacaatatacacctcttaagagattgctgttcaggggaaatgggttgtgtaatttagcacctggctcaaagtttgtgcttgtttaatgtttcctcaattggatattaggagccaggtttttaaaatgttccatgtgcactctggaaggaaagactgggccctagtcagacagattattgtaaagttagctggcatggaacaagaaaaaataggagaaatgagagatcgaagctgatcggagcaaattttcatccgttggttagaatcgcccaatgaacagtgagaaattgacgtgacagtcttccctaggaggggtcttgcctgtccctcctgtgaacgccagcatttggattccagctctgtgccaggctctaggcttatgactgcttcacagggggccatgacacatctttcaagaaaacagcagagctgcttgtgaaagagaccatttgtcccccgcagttcccatggagatccagtttgcttctggtcaaatcctgccctccagccccgcactgggaagaagggagggaagaaagaaggaaatgcagagggggcatcattgcatttcacaaacaaagagggatacgatttataagaaatagaaatagcctttcaaaaacgttttgatagggattagaatgtttctaaatctgcagtgtttgacagatttccccttctgcctgttcttctttttctttcctcctctttccctccatctctctgatacttacccaccagataatacacaccaggcacctttcaatgaaggaggaaaggaaagggaggtagcacatgagggagacctagattctgccctcaagataaattcacatatttaatattcagacagagatgatgtctcatttagccagcaactcccttgggggaatgagatgttcctcgtaagcaacttttcctgataactgaagcttatcctattaaaccttagaagttaaaagaaaaaagaagttaactatttgccatgaaagttttaaataaatcctttccaagtttgcaggctttttctgtgtgtgctcagagtgggtcatatccctgcctgctaaagcgttgacctatttggtgcctatgtggtactacttagacattctctcattagatgctgtcttgccctgccaggaagggcagacctgtgattcaggctcaggtcggcttgattgcaaagtgcaaacttttgaccatttctggaaccatataggaccttccctggtgcctgggaatccttcagacccaccatcttgaaacatggggctcctcctggcccatatctggtgtggaggtttgccttctttcacgttactgggggcagtctgttgtgtccacctcacctcttcccttcctccttcgggaatggagcacctggagaaccaaattcattagggactgacagcatgcggagccaagggttttggtgtgagagccatggggaaggccacgttcatgctctgaatttctgttaataatcctggtgttttaattgggctccctgtttccacagacccagagacaaggatgtgagggcaagtggtttatttgagaggtgatcccaggccacaccaatagaggaatggggaagtgagacagagagttaaggcagctggtaatgggtgcatcaaagagcaggtgcttggggggattggggtgcagtcctaaaatgagcatgcctctgggtcatgccacccatgagagagggggctggaatatccatcaaccaacgcccacctatagttggttgaggtctccaagtgttctagccagcccatgtttccagccagagaaagtcctccagcagaggatcttaggggcttgctgtagaaagctgctgcacaaactagcaataattatggtaactaccataataaagatagcacctgccgctgcttgagattctactgtgtgccaaatatttgttctgggcaccttacttgcattatatcattagtcctcactgcaacccagagaggcaagaggctacaattgtccccaccttacagatggggaaactgaggctctgagtggatcggcagcttgcccaagttatcacagccagggagtggtggtatcaggatttgaacctaggtttgttctatatactttccccattttcctttcggaggagaacattgtattccgaaagattcaggctcccattcatctctcatctgggaagtagaatgtattcctctgatatggtagttctcgagtttcacgtgtgcttgcttaaaatttgcattcccaaaagacacttacccaatcaggaccttggagagtgaggcctgggaatctaattttgaagcaggtggtctcctggtaaattacacgctagtagctctttcttccatgggtagggaaaaggaaaagccacattttgggaaaatgatgcacatttccagctggaagaacagtttccattaagagggacatagtgtgctttgcaaaaccttgctgtggtccctcttccctctgtctccagagtctgtgtaatttcagggtttgtctaatcctgccgactctattagcagatccgggatgtgcaggctctcgttcttgacatctgaacctaagtgcaaggtttaagtgcctgggcattggagatatttcccttggggttttctgcatgagcaaggctgtgtttccactgctaatgctgcccaccgaagcccctggctggaaggaagagtgttcggtctcccactcctgggacagaggtcaaggagggcttttccattactgcaagagagaagcaataagggactctggagaggaaaaattgccaaggaggagagcaggaaacaggccaaggtcatgagcagccttacctgttctgtcttgggttagcagtggtctacaggttaaactaaattgcatgctcctgattcaaagtgctgcccacgagataccaacagggcttctttgcatctgcaaggcacttttccagctgggtttattagagatgacttttaggtgggggtgttagaaaggaaaaatattctttcttgaagtttctggggtggagtccagctattccaagtgcagaaacttcttggactgactcccctttgacatcagattccccacagctcagggcttcccaaacatcagtctggccatgtcatggtcctcagaaaacttcagtggcttcacagcacctgcagattcaaatgcagaccctttgccttagcttttggggtccccaccccctccccttcctcatgtccccaccattcgtgttgttctcttcactttaaaagttctcatcactttaaaagcctcattgacctttaacttttgacccttgaactcaccacacttgttctgccctccaaacctttgtgctggaactcggcttcccctacccttgacacctacccaaggacctccctcataccccatcattccccccaacccattttcctgtaatattttttcatgatcttatgacatctgcaattatttgatttatctgcttatacatttatcatccctccccataaacagagaggctgcattagccttgttcattgtgaatctccagtatctggggcactccaggccaaactcagtgttgaatgaatgaaaggcccgtttcacatttagcagagctctgcatcagggctttgaagcatcatgagctttcccatgggggctgggacctttcccataagtctgagagtctgagggtcttagaaaaggaatagacaaagaaagccaggtcacagtaacttgggattttgattatccttgtgaagtcaagcatccgtattgggaagagttaggtgttatcttaggcttgtctcaaagaagggcattttgactcaggtagttatagctcccaggaaccttctactttacccacacctacccccaagatgttaaagcaaaaagagtgcaagttaggaaggcatttagcattgtggttaaaagttgggcttgggaactctgtctcttataggccatttgacattaggtaagttatccaaatttgatgagcctgagtttctcactctgtaaaatgggactaacaataattgctacttcttagggctgttatgaggattaaatgaatgatgtaaagcactcaggatattacctaacacatcaaacatgttagttcttgttattttcagtgtcctacagtctttatgacattcatgaccaacagcacttccaaatgtttttcaaccatcttagactttctggtgccaagagctatgtcctctttttgtagattccaaaatgtctaagtcaacttttcccagtctaactcagacatttgtctaacactctgtcatgattttatcataattacatatccactctactatttttacttattttctatttatggcctttttaaacttaaatttattgaaagatgaaaatgtatctcattatcataaatgaaaaatcaacataatttgccattaatataaggtgtgttagtctgttatgcattgctataaaggaatacctgaggctgggtaatttataaagaaaataagtttatttggctcacggttctgcaggctgtacaagtatggcaccagcctcttgttggcttctggtaaggtcttatagcagaaggagaagggggagcaggggtgtcacatggtgagagagggagcaagagagatagaaggagatgccaggctcctttaaactatcagatctcagggtctctaatagagtgagaacttactgattaccataaggaaggcaccaagccatttgtgaaggatccaccctcatgacccaaacactttccactaggtccacttccaacttggaggtcacatttcaacatgagatttggaagggacaagtattcaaaccatctcataaggcaacctggaaaaaataaattttcaaatggaaaaatcattgataaaattccctgtggatactgctacctgtcgaaaactgggactggagatagcacgtgttggagagacctctctggtgccatcagattgaaagagaattggagaggggcttacgtctcaccctgtgattcagcattgtctcatatttcctatgtccctccttgctccccttctgcactctcggtggtcccaggtctaactttttcagagaggaattcagagccccatcagagccatgaaagaccaaacaagagaaaaactggggaaatgtgcacaaatattccaaaacaatcagctaggctggtggttctcacacctgagcatgcatccaattcacctagagggctttttcagacccagagtgctgcctgctgcagcctagcctccaagtactgattcagcagatctgccagggggccccagaaaagttcccaggtggtgcttatgctgctggtctgagaacactactttcagaaccactgaactagactaattggaggaatcaatgttgagtctgtgcctgcatattcaaaccattattttaaagagaactatcaaatcaggaagagagtagggggcaactgtaaagttcctacttctgagtttaatgtatacgtctattttaatactaaatctccaagcagcctgagggccaccctctggcaaagatgttggctgctggaagttagactggtatgtgcaaaatggtaagagaatccaaggggatacgaatggggcacttacggcatcttccacagcgtgtatctatcctattgacataaaactctacaagaaaaggacaaagccaggctgcagtaatttgtgaattttattatctttgtgaagtcaggcaactccaggggaaagagcaaggtgtcctctttggctcctctcaaaggaagacattatcattctaaactcttcaactgtatgcctctaaaacttaatacctggcaccgatttcattataattggaagccctggttgaatgtgtcctacagcgtgaggctttaagaaaaatgagcggccacctttgggacccctgaccctggttttctgtcagggcaagtcagttaatccaagtttttccatctgtgaaatgggaatgataataatgcccatttcgtgaagttgttacgaagattaaatgacatagtataaaatgaatcttcaagtaaatggaagatgatgagaagaattgtgatgatgatcataaatacaggctgatgggaaaagcatgatatttgatattttttaaaacgtgaagtccgtgtgggcagtgctaataaaacagctgccatccattcttggaccacccaagacttacctgagagagtgggatactagaagcctctctgcggagataatttcctggtttgctgaggatatgcctttgcagtagctgccccatctcatctcacatcttggtatccacagcacccagagctttccagaccactgggggcatcccatctatccacctatccatctacctacccatccaccatccatccatccatccatccatccatccatccatccatccatccttccatccatccatctatccatttatttatctattcacttcctcatctatccacacatcaaccatcaatctgtctgttcattcatctcccatccattcatctagtcatctgtctatccatccacccactcatccacccacccgtccatccacctacccatttatccatctattcatccacccatccatccatctgtccagccacctatcaatctatccacccagccatccacccacccacccacccatgcatcaatccatctaccaatttatgcatccacctacccatccatccgtgaatccattcacccattcatctactcacccatctatcccccatccatctacccatccattcacccatccattcatccacccatccacccatccatccattcatccacccacccacctacccgctcactcagccattcacctatccatctttctctctctttatctttctcaggttaaagtgccacaacaaatgcaccaaagaagccccaccctgtcatcttctgatcatccaccgaggaggtaactatttaacacttactgccctaggggcaggggtgaggtggggctcctgcaggtcccccacatagctgtcccatcaggttggttctgaatacctcttgatccccacatacttccagcattgtttctttctctctgacgccctgtttcctgacatctgtctcctttatcctcccctatgcctgttctccctgtttcttgcccctctactggtccctctgacactttagctccctttgtctccccacttaacccctgctctctcatcctgtctcctctcctaatttctagcctcttctgtttaccaatcccattgcttttcttcccaccaaaaaaagagcactggctgggtgtttttccattgtgtgttctctagatttaatcaattggccttgcaaaagtaggcatgaggaggggtatgtcttgggtctgctggattgggccatttgtgtcccatctcctggggccctaggagtgtctgggtcaacctgtccacatagggaagtagcagccctgggagagccgctaccaggattccactgcaaaagcaagacgaatctggctggaaggaaagacagaaggaaaggctttttcctggctgccaaggacttacttataagggacactgccttgggaacttttgtagtgcagctttcaaaatagttcccctgatctttgccctatggggtgatcacccccaaactccattatccatattgaaatttatctccgagggactttctggacatgtgctccccaatacagtagctactagctacatttgactatttaaatttagattaattaaaatcaaataaaaacacaaatttaattactcagtcccaccagccacatttcaagggcttatactggtacagatatagaacatttttttgactgcagaaagttctactgcacatcgtaggccagatccttgctattcaaagcactgtccgtggaccagcagcatcaggatcacctgggagcttgttagaaatgcacgatttatggctccacctcagacctactgaatgagaatctgctttttaaacaggatctgcagggaattcctatgcaccttaaagttgagaagcactgctctagagcaggagtcagacataaactaagatgcctatgagggccaagtagatgtcctaaatgagagaagttggccagagcgggctgtgggacactggaaaaccgaagtgccatctagagagggtagccagccactccagctatgtggacctacattgccagcatttctgacatttccaacaaaagcccaaatagagaattttatgtgccatatgcttattttttatttattcaatgttttttgagatggagtctctctctgtcgcccaggctggagtgcagtggtgcgatctcagctcactgcaacctctgcctcccgggttcaagcgattctcctgcctcagcctcctgagtagctgaaattatgggcacccaccaccatacccagctgctttttggatttttaatagagacagggtttcaccatgtgggtcaggctggtcttgaactcctgacctggtgatccacccacctctgcctcccaaagtgctgggattacaggtgtgagccaccgcgcctggcccatatgcttatttttaaatgtaagcagtttattaaaatcttttaaagtcatgctggctgcctccctgcaagcccctcatctatagggtggacagagccttcaaatcaccagggagcaactttagggtacagcaacttgctcatctgacactgagtcctccttccctgtcctctcacttgcccacccccgtctcccctggccttgatcggtgcatattcctgggaatctgccctaatttagaatgaacccaagggaaacttaaagaaggaggcagactgctgctgaaagcactgtgatgtgtcccaaagccaacgggcagttggttttcgatgatcgttgcactgtttatctccaaaaacagagaaaattgcaagtgaagacaaagtcttcagctcccttctcttgcccttcccaccccacatccttaattgagaaccatctgttccttgaataactgtatacactcaatgaggctatcttaaaacctgaattctcacctcccttgagaccctgccttgggtcagcctcattggaaaaattgcctcccaccaaattctcctccgtagagggttttgctagaggctgattcccatatggacagaagcagcctgctggaaggtgatggctttcagaggctgacatttgaagaagggctccctcccacccaccctcaaggccatgccgccttttgttcaaaggtggcaggtgtctgtacatacagagcgaactgaactttgcagaaatccaccagcttcttgctttttctctccgttggttggaagttgaaaatatagtcagtttccatggtgatggcagctcaggctaagcagagaaatgaaatccctgggtcaatccggagcttaaacttctcaaccaacaccctcccctcaccgctgcaataaaacaacaacaacaacaacaacaacaacagctaacaagtaacaataccaggcatcaaatttgattttgagcttctcatttttgccccttgctgtgttccctgtgagtaatagaagtaacagaagggagaggggcttgggcgatatgatttggatcaggaagcatttatttagcatctactatgtgcctagcttcctagaacagctgtctttctttcagggatccaaagttgtttaggacaaagtgtttcaatgtgcggcaggctgcttaggcctgagaaatcccaaaaggaatgaaagatgatcctaacacagaggttagaaagttagggacagggcaccatgatgagcttgtccgctcatcacaggccctgagaaatcaggaacctcgtgtatttaaaatgagttttgagtctgccaataagaaacaattgtggtacttttaaaaaaacctgatagctttagttttattattatcatcttaattgtcaaaagtcatatatggacaatagaaatatgttgcaaaccacagagtataccctgatcccaccacagaatcattatcacttttagtgaattgtcctccagtctggagggtgggtctaagaggtgggatctgagctatgccgtcctggcataaccaaagacaaagtgatacttaaactcccaaatcaatgtttttacccctacggatccagcaaggttagtccggacagagtccgttccgtgtgacatcaacaaccctctacggaagccacctcgctattcagacctgcacatcagtcagacgctccccaaaaccaacaaaatcaacaaggtaaggctgggcttcccctgggtctcggcatgtggggctggcactgctgggtgaggggtaggagggaggaagggttgatctgggagtatggcgctccctcctagcccgtctcggctcccctaattctgtgatgtttgtgttgagtaaagcttgagggacgtccagagatcagtggagagatttgtgtgccagaaatcttatttagaaagagggcatgtcggaatgagaatggatgagggtgtccaggaaggcacaacggatgggaggagagacttaaaaggagtttccttagtggtccagacctcacttgctttgctctttgagaggttttgccatctgtattagtctgtttcatgctgctgataaagacatacctgagattgggtaattcataaagaaaaagaggtttcatggactcacagttctatgtgactagggaggcctcacaatcatggcagaaggcgaaaggcacatcttatatggtggcagacaagagagagcttatgcagggaaactcccctttataaaaccatcatatcttgtgaggcttattccccatcacgagaatggcacaggaaagaccagcccccatgattcaattacctcccactgggcccctcccatgacatgtgggaattgtgggagctacaattcaagatgagatttgggtggagacccagccaaaccataacaccatcttccaggaccaactttgcagatggttctgggctttctgacacatctgtcagatcagacctccaaggaataggggtctatttctgagcttctggtaggggctggatgggtgggttttctttgggggccctgagctctgagcaacaggcaatttggttggcttctaccctcagacaggtggtcagcagtgggcccctctgtgcatctttctttcaattgtggcctagaaatttctggcctgatttccatatcctttatttggtctgctgatggggctgtaccaaatctatcccgggggtatgcccagcctcacagtaggaggcaaaggttgcacacaccagcaggtgattttccaagcatctcaaagcttgcatgcattatgtcgaaggtagatgtctaagtccatttgcattgctatgaaggaatatctgaggctggataatttataaagaaaaatgtttatttggctctcagttctgcaggccgtacaagaagcctgacaccagcatctgcttctggggaggccacaggctgcttccactcatgttggaaagtgaagggaagcacgcatcacacggtgaaaggaaggaaggaaacgtgcatgagagagggagagagagagagaggagaggggagggaaggggagaggaggggaaggaagagaggtgccaggctcttttaaacaaccagctctagcaggaattaatagagggataactcactcattaccgcaaaaaaagggatcaaactcttcttgagggatccacccctgtgacccaagtacctcccactaggccccacctccaacactgggttcaaatttcaacatgagatttggaggagacaaatatccaaacgatatcagtggaaaaagcacatcagcccaaggatcgggagggcactgacctgtgttcaggtcctagaggaacatcatgatagctgagtcactattcaatggcaacacacagagagaggattgcccccttcccaacccatttcccacacagcagccagagtgatacttaatgaatgtaatttgaattatgtcatgccctgcttaaaaaccgtccaatagctttcgactgcatctagaaaacaaatcagactctgctgcagcctgaaagcccatgcaaaatttggtccctcctctatctctgacctctccttccatgtcttcccacaaagcttgtgtgtccctttgctcttaagctatctcacccgccatttttatctcgaagccatttaccatctggctccttgtggcataatttcagcagctgagtgaagttggcttctggaatcaggcaaacctggcagccagccagggcttcctttgcttattagctgtgagactgagcaagtaacttaatctctctgagcctcagttttcccgtaggtaaaatggggctgttccagttatctactgcagcacaacaaaccacccaaacttagtggcgtacgacaatcatccttttattatactcacagaatctgtaggtcaggaattaggacagagagcagagggaatggtttgtctctgctccataatgggaatcaactgggaagactcacacagataacggctggagtcatctaaaacagggattgacaaactatggcccacaggccaaatccagcccacaacctacttttgtaaataaaattttattggaacacagccatacccatatttctgtggctgcttttgtgctatgatgtcagagttgagtagtcatgacagagactgcatggcctgcaaagcctaaaatatttactgtcagattctttacagaaaaggttttctgacccctgatttagaggctctttcactccatgtctggtgcctgggctgggttgagtcaaagcctgggttcagcagagatgtcaactagagcacctgtatatggacttgctgtaatgcttgggtgtcctcacaatatggctgcctcagggtagtcaggcttcttacatggtagctcatggctcaaagagcaactgaattagcaaacaggtggaactttgacagtgtcacttctgctgcactttactgatggaagcagtcacaagcctgctcagattcaacgggaagaaacacggacctcaactcttagtgggaagcgtccacggatttgtagtcatgttttaaagagcccgtggcaggcaataagaacactaacctcagacagttgttatgaggatggaattcaataatcaacatttaaatgcactcagtgtacttcctggcccatagttaatatccaggagattctagctattattatcagcttaaatttgggggcctttgatcaaaacatcaggccacgtccacttttcctttgttattggcaaaagatataggtctctaggagaggggatccccactgctgggagggctgagcaaattcaaatggcgaggcttctgggaagtataataattgtgcatcccttagaacccattctttcctttgtgacattttgagggacgaggagctcagaaccaccttgagacctttctctctggctttacaggcacagtgagcctcttggtgtcagatgagactgaaacataggtcagatagatcagtgactgtgacattgttctgcttgtctgccagcaggagaatttgataagggaaataaattaacctctattaagaaagcagctttgacatgaaggtggacaagatctatcatagggctgcgttattttttcccctctttcccttctcactggcttcacacagattcttcttgtcaggcaatgatgtggttagtgcaatacatttctgagccaatttggtctgaagattttttttttcactgctctttgtcttgtctcctgtctagttcagtcaatccaggttcacaaaggccctgctttttcacccagcacagtggttagagtgtagattttggaaacaggaagtctgagcttgcaactcagctctttaacttgctgtacgactgtgggccagttatctgaagatctgtctgccttagttttcctttatgtaaaatagacataataggaggtatcattggggttgcagacaggattagatgtatgatatgtataaaggattttagtcaaattctgaatactcagggcatggaattagcttgatgatgaagaagacagagaaagaggagaaggaagaggcaggaggaataggaagaaggaaggaggaggaaaggaaggaggaagaggaagagaaggagaaagaaggaggaagaagaggaagacagagtggggtggatgaggagaatggaggagggggaaggaggagaagcagcaacagtagcatctgccaattccttatgggaccaagctacaacccttgtacttccacatcaagccatcaaaaataccatctgcagtagtggcagaggctgaatctctgcctgctgtattcaagctgtttgaagtggctgcatgctggtttgcttttgttggttggttgcaaggtacagagacccgcctaggctggctccgcaaaatgagttgtcttttgtaaaggatggacatgggggcaattcagagaaagggaaatcatcatttaggcgctgggcctcatgaaactagacgtggaggatggtctttagctcagtccagctccttggacccaaagcaagcccataggccattgttctggtcttccatcatgaccctgacttagctactctttatgggtctgctctgatgtgttgttactgttggctggtttcctcatcttctacttttgtctttctttcctctgtcattgcttctgcctccatatagttcctactccttatgacctttggcttctttgttttctggcctgttgtggctcccctgttctctttgaacctcatcttatctcagcctttgctcctaatgctctctgctcttcttcctaatggcctatctcatcattccatcccatattataggtcactggtcagctgccattatgctctggcctatgatcctgtgttgggagtgggctatggaggtcataagacaagtgtgtctgtttaggacagtccattgaacaaaggctgttgggttggagggtgaggacagtttccttagaaagtgtccatgggagaacaatgaccatcaccgccatgtccaaatcagtgctcagctggctgaagtggaaacctgggtgatgaacgtgcttctatttgagtttcagagtcagatgtgaatttcttattacttggcacaacctcgtgcttctgcttctgagccatgacttgggacctgtgccactaatgctctgtgtgactccaggaggccattcctctcaccttacagtctcagcatcccctcctacagaatgaagtagttggactggatggtctctgatggatgtttccagctcttatctatgttcagaaagaggaattatgccattagcctttccctgcatgaactggtagagtttaataagtttccttctgatggaacacaaccaccagctgctggtcccgttcagacacagatgtgggtttaacctgcagaagagattttccctcctgttgtaacaattctgccaggataagtgagtaccatacgtattaatgagtctgtcctcaaagaggtagagataagtccttccaccataaagacaattttctctccttctctccctctttccctctatcctttcttcctttcaattgcttagttcattcattcattcatataacattgattagttacctcctatgtttttgtttctgtgcttagttttgcagattccaagatgagtaagtaacagtctagtgggaggaaatagatcttcctcctctattcctctctcctgttcttccatacaacccttcctctttccatttcttcctttcttttttctttcatccagcacacatttactgaggggccaccatgtgactgtgtgactggctcattgctaggtgctgatgcatataacatactccctgtctcagggagtgcctagtctagaggatgagacagataagctgacaaatgtccatgtagaagcacaagcctatatggttttttttttaaagttagacgatgaccatctttttgcagagcatctatggaaacttcttgaaattttccagcaagttcaaagagcaaggcttgggagggtggatagatgcctgactttcttttcctcgtgtaatataattggcctccagctttcttgaaaaacctcacctgccccctgggccaagtgggagcttctttctatatcatagtcataaatgataaatcttcactccacacgtcactgacatattattccttacactaatatgtccattgttatggaaatgcaattaccattagataaattaagatagagtgcgaaggcttcctgatgcctttctactaatgttggatcagagttaccttcaaggtggtcttgcgtggcaggtggttagaatgaactacagcataaccttgcctaaaatagtaagactatgtccaagtggacagatgttccctgccttctactggggctcacatttatttcttccacacagggtctgagatcaaattggggagatctgttattccagggaaaattctatagcttgggaatgttaattgtccatggggccagtatccatttgtttgtctacacaatcatagttgagtttccctttctcagagactctctggagagggtctagtttctccctccagagataaacacctaacttgcaggtttgctgccaagattaaatgaactaacaatattagttactctgcttccaggaagatggagtaattgtacttttccatattcctcccactaagttcagttgacccttgaaaaatgtgggggtgagaaatgccaaccccacccccacagttgaaaatccacatataactgttgatgcccccaaaacttaactactaatagcccactgttgatcagaagccttaccaataacacagagtttattaacatgtattttgtatgttctatgtcttatatgccatattcttacaataaagtaagctaaagaaaagaaaatgttattaagaaaattataaggaagaaaatatatatttactattcattatgtggacacaaatcatcataaaggtcttcatccttgtcgttttcatgttgagtaggctgaggaaaaggaggaagaggaggggttggtcttactgcctcagaagtggcagaggtggaagaaaattcacatataagtggaccattgcaatgcaaacctgtgttattcaagggtcaactgtacagctaaaaacaatggacattgtatataaaataaacataagaccactctgaaagagggcaagaaggaggcagaccagctagggacccaagcaatgacacagtggtgagttccctaagacttttttttttttaagatggagtctcactgtcacccaggctggaatgcagtggcgcaatctcagcttactgcaacctctgcttcccgggttcaagcgattctcctgcctcagtctcccagatagctgggactacaggcacccaccaccacgcctggctaattttcagaatatttttagtagagatggggtttcactagttggccaggctggtcttgaactcctgaccttgtgatccacctgccacggcctcccaaagtgctgggattacaggcatgagccactgcacctggccgcctgagacttcttttagcttcatgtatcccagacttagaactgaagaagctggcaacctggatgtgtcaatgagtaaaaacaaaataagccccaacaaaagcctgccccatctagtcaaaggcccaggaaagggacagcttagcaagaaaacttttacccaataaccgtcctaccccagccaaacaccacagaaaaatctgttgccctacctacccataacagcaaagatcaagtagggagtctagactcccatccttgtcaagctgaaccctggcatcccaatcctcctgccaggctggtgttagagaaggctgagtagggactgtcatccctgctggtgggaaggaacacccccctcacccagcaataatgcagcactccctcccacacctgctgaggtaggattcaaggagacctagtggagagtcagagcttttacaccaccatcattaacaagtctgctccctgctttttggcattcttacccctcccagcaagagtggtatcagcaaaggtctatgggggagctggatttcaacctctgcccagcaataatgaggaactccttccctcttcagggactaacagaagctgaatggagaacttaaatttctacccatccctggcaatagcaaggcagtacctcccctttctctgctagagcaatgtcagaaatccagcaaaaacaagaggtttaaataacatccaaagtctcacaacataatactcacatgttcaggcttcagttgaaaattacttgtcatagcaagaagcagaaagatctcaagctgaatagaaaaagaaagacaatcaatagaagccattgctgagatgactgggattttagaattatctgatgacacttttaaagcattcattataaaaatacttcaataagcaattatgaacgttcttgagactaatgaaaacataagaagtccctgaaaagaaacagaaagtgtcagcaaagaattggaagataaaaagaagaagcatttagaaaatttagaacatacaattagaaaatacaataaccagataaaaaattcagtggatggactcaataacaagttggatggggcagaggaaagaatttgtgaacttgaagatagaatgatagaaattacacagtctggataacagagagaaaatggcctgagcagagtatcaaggacccttggggattataataaaaaatctaacattggtgtcatcggtgtcctggaaagagagaagaggagaaagaggacagagctgaaaacattcttaaagaaataatggttgaaaacttcccaaactgggcaaaagacataaacctacagattaaagaatctcagaaaacgtcaaagaaggtcaattcaaagaaatccatgctaggatatgtcatgtcaaacttctgaaaactgaagacagacaaaagcatcttgaaagcaacaacagagaaacaatactttacctatgggagaaaccattcaaatgacaacaaatttctcatcagaaaccatggaggccagaagaaagtggcacagcattttttcaagtgctgaaagaaaagttttcaattcagaattccatgcatagtgaaaatattcttcaaaactgaaagagaaatcaagacattgtcagatgaaggaaaactaagactgtttgccataagtacacctacgctgaaagaataactgaaaagtattttctaaacagaaaagaagtaataaagaatcttggaaaatcagaaaacagtaaaaagtgtacaaatactagtagatacaatagtacatataccttctcctcttaattttccaaattatgcttgagagttgaagcaaaaattgtaacactttctgatgtggttctatatatatgtacgggaaatatttaagacaattattaaaggaggagggtaaggacataaaggaaaacttcactcaaactggtaaaatgtcaacaccagtagactgtaataagttatgtatatataatatactacctacagcagccatttaaaaagctatacaaagagatacactcaaaaatactctagctatgtcaagatgaaactccaaaaaatgtttaactcacaggaaggcaggaaaaataaaacagaaattaaaaatgagattgacaaacctgtagcaagaccaacaaagagaaaactctgattacaattgtcaggaatgggatgggacatcactacagaccctgcagtcatcaaatggataaagagatatgctacacatatacattttatagcttaaatgaaataaaccaatttcttgaaaatcacaaacttccacaactcacccaatatgaaatgtataatttgcatagccctgtaaacattaaggaaacggaattcgtaattttaaaactgtcttactccaaaaaaagaaatctccagatggtgtcaccagagaatactaccaaatgtttaaagaagaattaacaccaactgtacacaatctcttccaaaaaatagaagagtatactttccaactcatgatatataccaacattaccctgatactaaagccagagtacaaaaaaggaaaactacagactaatattcttcattaatatagatgcgaaaattcttaacaaaatatttagaaaatagagttcagcaatatatacaagtagagtttattccagggataaaagactggttcaatatctgaaaaatcaattaacataattcaccatattaacaagctaagaataaaaaataacatggttatattaattgatacaaaaaacttgtttgacaaaatccaaaaaccattcgtgataaaagaaatcagaaaagtaaaaatgaggaaattcctcaacttgataaaagcacctaaaataatactacagctaacattatacttagtgatgaaaaactgaatgttttcctctacagctaggaacaagctaggacatccactctcaccattcttattcaacacaatgctggaagttctggccaatacagtaaggcaagaaaaggaaacaagacatgcagattggaaagggagaaataaaaatgtccttatttgcaaatgacatcatccatgtagagaatcccaaagaaaatacaaaaatcccaaagaatatattttttaaaaagttcttagaactaattagtgaattcagcaaggtcacagaatacacaatcaatacaaattagttatatttcttctttttttttttttgagacagagtctcattctgtcacccaggctggagtgcagtggtatgatctcagctcactgcaacttctgcctcccaggttcaagtgattcttccgcctcagcctcccaagtagctgggactacaggtgtgtgccaccgcacctggctaatttttgtattttttagtagagatggggtttcactatattggccaggctggtctcgaactcctgaccttgtgatctgcccatctcggcctcccaaagtgctaggattacaagcgcaagccaccgtgcctggcccaaatcagttatatttctatatactagcaattaacatatggaaacctaaattagaaacatgccatctacaattgctgaacaaaatggaaatactttggtgtatatctgataaaacatgtatagggcttgtatgctgaaaactacaaaatgctggtgaaaggaaacaaagatcaaaagaaatggagacagataccactgtggttcagcctgtattccgcacaaagatatgctaaagtcctaacctccaggacctgtgaatgtgatctttggaaataggaactttgcagatataatcaagtttagatgagggtatactggaagggtggtcccttaatccaatatgactttcggccttatcagaagaggagaagagaaacagagacacacagggagagcaccatgtgacaacagaggcagagattagagtgatgcaactgcaatctaagtaatgacaagaattgctggccatcaccagaaggtaggaagaggcaaagaaggattctacctaaagtctcagagggatcctgagacacggccttgccaatactttgacttgggacttttgccctccaaaattgtgagagaataaatttctgttgttttaacccactcagtttatggtactttgttacagcagtcctaggaaactgatacccataccatgttcatggattggaagattcaacatagttaagaagtcagttctcaaaattcatatataggtttaacacaatttataacaagatcccagaaagattatttttataaataaagacatgattattctaaaagttatgtgaaaagacaaaggaactagaatatctacaacagctttattcttttgtgaaataataaagtgagaggaatcagtctacctgatctcaagacttcttatatagatacagtcatcaagaccaaaatggatatacagatggcaagtaagcacacgaaaagatgttgaatatcttagccattaggaaatgtaaattaaagcacaatgagatatcactacactccaattagaaaggctaaaataacaaacagtgacaataccaaacactggctaagaggcagagaaaaatcaatcatttgtacattgctggtgtaaaatggtgcagctactctagagaacagtttttgcattttcttttaaaactaaacatgttattactatattatccagaaactacacttctgagcatttattccagagaaataaaaacatatgttcacataaatcctgttaataaatgtttatagcagctttatccacaatggcaaaaaatagaaaacaacttagatctccttccgtgggtaaatgtttaaacaaactctagtacatccatatcatagagtactactcagcaatcagtcaaaaggaagaaactcggcaatcaaaaggaagaaactatcgatacctgcaacaacttggatgaatctatagagaattattctgagtgaaaaaaggcaatctgaaaaggttacatactgtatgattccacttataaaacagtgaaatgataaaattatagaaacagagaatagaactgggcaccagggtacacatctctaatcccagctacttgggattgaggttgaggcaatgggattgcttgagtccaggagtttgagaccagcctgggtaatgtagcaagactctatctcaaaaaaacccacatacagctagtgtttattatactggacagatatggagaatagattagaagtgccaggggttaaatatggggggaggatggtgaggagagaacaggaaatgggtatggctataaacgggcaacatgagggatcttcgttttgatgggtctgttctgtatcttgactgtatcagttcagtatctgggctgtgatattgtactagagtttcataagatgttatcagtagagaaaactgagtaagggaaacataagatctctctcttcttacaactacatgtgaatccacaatgatctcaaaataaaaagtttaattatagaaatatactatcattaacataatagctactaccatttattgatgacaaagcacctctactcaatacgaaggaggtgggtacctacataactcatttaaacttcacaacagacctacaaggtggatgttcttagcccatgttaaggataaggaggccgaccgcattgacccacacctgtaatcctagcactttgggaggctgaggggggaggatcagatcgcatgagcccaagagtttgaaaccagcctgggcaacatagtgggaccctgtgtctaccaaaaaaagtgttttaaagctgggcatggtggtgcatgcttgtggtcccaggtactcaggatgctcaggtgagaggatcgcttgaacccaggaggctgaggctacagtgagccgtgattgtgccattaccctccagcccaggccgcagaatgagatctcatctcaaaaaacaaaaataaataaataaaaataaaatttaaagaaaggataaggagagactcactgacccagaagcagtgtggatctagtggcagtggagtgggctttgggaaggtgaaatgtacaacctggctggacacccagtaagcatctagacagagaatgtccatttcccctctgcccttgacctcctttgctattgggtgttcgccacacctactcttggagttggcagataagcatacctgttgaccacactataccatctttgggtacccggtccatatgagtagtggacctctgagtaatggagggatcaagtgaccactgtcctgtgggtgaacagatgaaggctcccctgggaacacttagctctgctggctttgagaggtaggaatcccttttatatcatgtggaggtttgctgcttttgctcatctcttgccatctggtgaaagcaaaaagtcccaaagaggtgaaaagcttttcaagcttcaggcagcaccaatctgtccctttccaggagaacatgcctgcaaatgcatacagctactgttcctccctgcctgcctccctccctcccatgcctccacatcagctactgttcctccctgcctgcctccctgcctcccatgcctccacatcagctactgttcccccctgcctgcctccctgcctcccatgcctccacatcagctactgttcctccctgcctaccattcctccacatcagctactgttcctccctacctgcctccctgcctcccattcctccacatcagctactgttcccccctgcctgcctccctgcctcccattcctccacatcatttaatcttcatgcagccctgtgcacttgatgctatcattactcccattttacagaggacaaaaccgaggaatggaaaggttgggcattttgcccaggatgtacagaaaagaggtggctgtggaatttgagtccaggttttcctgactccggttcctgctgatactaatttcctggtgctgctgtaacaaaagagcataaactgggtggctaaaacaacagaaatttattctcacacagttctagaggccagaaattcaatgtcaagatgccagcaaggttgccttctagaggctctgaaggacaatctgttccatgcctctctcccagtctctggtggctccggcagtccttggcttgtgtctgcatcactccaatctctccctccatcttcacatgactttcctctccatatgtctgtcattggatttaggactcacccgaatccaggatgatttggatatttgtcattggatttaggatatttgtcattggatttaggactcacccgaatccacgatgatctcatctcgggatccttaccttaaattatgtctgcaaagacccttattttaaatatgatcagattcagaggtcctgggtggacgtcttttgggggacactgttcaacccactactgtgcttggaagtccaccccagcaggccattccgaaaatgcacacatggattctctctctctccttgtttttgagctggtctggggtgaggagaggcagtgctggttccagctgtgacccaagctaagatgctgaaggctcactctcacattctctctggagctgtcagactgttgattctttaataaacacttgggaggagaggtgttgggatgggaggggtactctggacacctctgcatggggtttttcagaatcaaagaggcacagggtgagtgactgtcacctgtttggttttcattacgtggtcacctttcactctggggtccaagcagtggacaggaattcgactccagaggctgttccttccacagctggatgcagcccaatggggctgatgaagcgggagggacttcggaaggatctggtggctgaggaaagggcaagaattgttgcaggggctggggtgggggcctctcctgctcagcccactctttctgctgtgtttctgcttccctgcctgtccctgactcctaccctgttttctctctgcaggaccacatccctgtcccttaccagccagactccagcagcaacccctcctccacgacgtcctccacgccctcctcgccagcaccccccctccctcctagtgccacgccgccttctcccctacacccttccccacagtgcacacggcagcagaagaacttcaacctgccaggtacctccatgcttggggagacatgaggggtgcagcgttggaggggcagagattagggagggggtgggttcatgccagagccctgatgcagcaagtctctgcaggaaagcgaatgggtcaatgaccagagaggggcaaggaagtatgtggactgacccttatcgtaccctaagcaattacccttatatcacttatttaatctttggaacagccacaaggtaagcattatcagctcattttacagatgaagaaacagaggctcaaagaggtgcaggaactcttagagactctgtcttttggcgagctacaacccagggtcttcgcctaagtctaagtcacagaagggagccattggctctggagatgacagttgtcttatgagctaaattggttaaaattggcagtgagatcctgtgctggagatcttaggggcacatgtctgagcagggctgcatactgagtcttaacccagatgtgaggacagggctgtcactgagcagtctggactcctggagtcaagatccaggtctattgcattcttgctgtgtctcacctctgaaaagatgtagttggacaagataatctggaaggttcctctagctcaggaattccaaggtacctggactgttgaccagagagtatgcactgggctatgagatgatagtagagaagccactcatgggacactgtggtttcctgacctcctttgtcattagacctaagaatgggatttttttttccttcaggtagacgagacctaagaatctccccatctcttccagggtccagcctggcccggttcctctgctagggccctaagaatgcttccaactcagccatatttatggcactgcagctggcttcaacaagaaggctggtgggactggcatggccagttggaaccagagtctacatctgttttgttcaacatggtatctgctagccatgtgtggctatttacatttaaataaattaaaattaaatataatttaaaaattagcttatcggttacactagccacattgcaagggctcagtagccacatgtggctggtggctgccgtactgaatggctcaggtgtagaacatttccatcatcactgaaagttccattggatgctctggtctagcacctgatttcctcctgagtcaacaagcttcacactatgaaaaaaatcccaggtccttggccacagttcacacctctaagcttaaccaggcatgagtgagtggccaggaggcaaacagaggccccaccccacacctgggcggcacccacatgcaaccatccatccatctgaggacaagccaatcacagcacctgcccacactgttttgatttgggttatatccacagagatggcacatattttgaattcttggaactttgggttttttgttaagttcaagtctgaatttaacagcctcatatccacctagtgtaggggccactcatctggcagccaccaaggactgcaatgtgagtcaccagctgaatcgtcttagtaaatgccaccgattcattgcccggcacttccacagacagaaggctcccaccgccatctccagggttgttcatttttacttcttcagaaggggatgaagggaaaaaaaaagaccgttagacttcccatgaccacccacacctgggggaagtgagcccgatgctttccaatagccacttcactccctggagacactgacttcaggagtattttctctgaaattgtttggcacttatttatggaccaagggatggggaagggccgttttatgggagaactgtgcacaaaaggaccacagctcttttcatcccttaaagaatctgctggcatcttcagacaagagacctgcctagccaggagtaatcagggtgtcccttagctccttccttccctcagccagagtcttcaagaaggggtgcctgacaatttgctgttctagcgtgccaccttatccccatctgctccatgacaggccatgacaaggtcctggccctctttggggactgggctaaggggtcctttgggtaaaagcacttcagcatggcagttagagtatgggttctgcagccaagctgcttaggttcaaatctcagctttaccacttaatgtctgtgtgatgctggacaaataactcgcctctctgggcctcagtgttctcatctataaaatggagatcataatagtacccaccttagataattgttttagaaagaaatggcataatacatggacaaagcttagcagggtgacagtttcattgaagacctcaacaaatctgggctccttggattattattaaatacaataataataaagtacagtggctatctttatttgcatttctcatcatcactgctaattaatatgaggacctagacagaattgtagaatgaaagatgaaatccccatataccttgacataggagtatgaactgaactcaacatttggggaaggtaatttggcattttctgttaaagtttttttgttgttgttgttgttttgagatggagtctcactctgtcacccaggctggagtgcagtggtgcgatcttggttcactgcaacctccacctcccgggttcaagcaattctcttgtctcagcctcctgagtagctgggactgcaggtgcacaccaccacacccagctaatatttgtatttttagtagagacagggtttcaccatattggtgaggctcatctcgaactcctgacctcaggtgatccacccactttggcctcccaaagtgctgggattacaggtgtgaaccaccatagccagccctgttaaagttttaaatgtgcattcctttgaccattatatcacttctaggactttatatacagaaacgcttgcactagggtgcaaagatctgtgtgtaaggacttcactgtaacagtgaaaactgaaattaacccaaatgcccatcaagagtaggtggtgaatggttgaatacacacgtatatccgtataaccaaatattctgcaaactttcaaaggaatgtagtactctatatagatttcctgacatggaaagatatccataatgtttcttaagtagaaaataagtgatttgcaaagtcatcagtataatattctatttattgtaaaatatttacatatatatatgtctgtgtaccagtgtgcatatatgtgttggcatgtgtgcagtaaagtctagaagaacttcatggcagctgttgaggacagggactttatctcatgcacttctacgatatatatgagtgtgcatccattttagaatcgaataataataaaattcagtgctgaaatggaaaacaaaacagaaccttttggaagtacagttgggcctaccctgtgtcttaggtggttttagcaaaacactcccagggtcaagagtacctgtcgtgtttgtacaaagatctggctagctgtcccactcttgactgggagcttctgttgatgaaaaatggagctttgcctgtgggtccctgccagatgttgagttttctgaaggctatttaagctaaagcttaggcataacaatgtccccagcactgattcatctagaacattcttgtccaaaaggggctgggggggttgaccagccatttaactcatttgttaatctcaggacatgtggtgaaaaggatataagaaccccaagaatggcgtgtgcagcctcggtggtatttgtgactgtgtgctgccagttgggtggacctcctgttatcagcctttccctgagtcctggggccatgtggacatggctcagtataaggtgacatcaagagtgctgcatggacagacagacctggagttggatcccagctttgctccttgctagctgtgtgattttgagcatggtattgcttctgtttaggtctgtttctcatcagtaacatggggctagttcactgctactgatgagcagagttgtggtagcatccatcatggcaagacagatgaagaggcttcgaaaatgattgtcttatgggtttctgaggctggagtgttcaaataccttctttctttggagccaaataccttctgtctttggagccacctagagccatcttgaaacacacacacacacacacacacacacacacacacacacacacacaactccaggaaatggtgaattctaatggctcaaagggagaagaaaggaggtggaatctgcctttggtggaatttgcaggatttctgagacctcacttgggccatgtgggctcatgagagtgtttcctccctttccctttccatcagtctctcctgagtgcctcttttatgctcatcactctgtgccatgatctggtttacatactcacttgttaagtgtctgtctcctccatcagaatgccagctgcatgagactaggcaatgtgtcttcattcaccactccacattcaaagcccaacatgttgcctgcaactgaaggcactcattacatgtttgttgaatgaatgaatgacctgaatttcatgcactgcccagggctgcagttttttctcttcaaattttcttcttggccctcagactgtgttcatccattcattttgttaacagtatttattacgcatctactgtgtaccagctactgtactaggcactaggtttggaccagggaacaaaccagacatggcccctggattcacttcctattgttattgtaacaaatgaccacatactttgtggcttaaaagcacacaggtttattatcttatggttctagaggccagatgtccaaaacgggcttcattgggctaaaaaccgagatgtcaatagggctggtttgttctggaaggtctcagggagaatccatctccttgccttttgccagcatctaggggctgcccacataactttgcttgtcgcccctcctcattctggcctctgcttgcatgatcacatctccttctctgaccctgccttcctcttctgaggacccttgtggtgacattgagcccacccagatgatctaggataatctccccacctcaagatccttaagtaatctcatccaaagagtcccttgtgccatgtaatgaaatggattcacagtttccagggattaggacctggacatgttgtagcggcaggggcaggcattattctgccgacaacagccccagttctcatgaaaagtatagcttagtgagaaaaaaaggtattaaccaaataaacatatgcatgaaaataggattatagattgtgatgaaggctgtgatggctaagagcctttgctcttagctaagatggctaagagtccttgagcaaatgcaagagaacagatttaggttggagggtcactggatggctgagttttgcaggtgggggaagtaaggcaaaggcccagccacaagaaggggcccaagtgccataaacaagggaaagtggcctccagagagactcagagctacagggtctggtcctggcaggattttagattttatgtgagactccatgggatgcagttgaaaggtttaggcagagaatgacttgacctttcttccttccttctagaagaccactctggctgctctcttgggaggcctcagggtaggcatgggggctccagaggggaagctgcttcagagtggcctgcttgtctctttgacttcatctgcagcctcccaggtcctgagtcatcttggatgccagaaagcccggagccactctgctctcctgagcagcccactcaaggtcaccagttgttctttagagccacttcttgatggtgtctgtcatcagcaggaagaacaggtctcccaacaatgtctttcttcctctgctggtcatatgtttccctttcagtcaccaggaacgagttgttccatggcacatggggaggagtcaaggagggcgttggcttcgggtgtggaggcatttgctggtgtcctgttgcctgacacctgtcccttctcggactctctgaagcagctcctgctctccgttgcccaaaaagaacatagctgtcagtgaaccttttctgcagacactgaatcccccatcactgtcagagctgtggagggaaaagatcagccaagtctcttgagagcctcgggtcgtctttcctgttttaattttagccccttgttgactaataaagtagttgtatgtaataaaaaacttctgttatctaatagtaaaacagtccctgaagtcatggagggtgattttcttttaaagctttgctctgtgaccttgaataagctgcttcttgccctggacatcccattttccagaatcaaaaatggactccaactatttgatataatctggaattggactaagcccaaggtttttgctgtttcatctgtgataaagagagttggttaattcaacaaatgtgtgttgcacactgactggtgcaaggcacagaaccaggagtttgaggtcctgagatagtaggacttactccctgtcctgaaagaaactatcaatacatttcaacctcagggagagtgttccgtctgcttccccaaagcagaagatttcattagcacttggaactatgtgattgtctcgtggctataaatcattcttgtctattagttaagagagcttagaaatgtgtttatttatctcacagctaatatgaattcagcaccttcaatacacttttatctcgtaatgatggtccttgccctttgaggaagggactgttattatcctcattttacacgtgtggacagtgagacttggagcttctacaaatagccaagggcagagcaaagatttgaccctagaggatcagcttctagactctaggctctgagctactgtgctaatatttgataaagcaactccagtggtggcttgtccctgaatgtcatcaaattgtttctgaaagtggattcaccaatacagactcatctgactatatccctgccctcttcatttacttaaggacacaaatctctgtgtcccctgcccccaacaccgcttggccccctattccaggcactattccccaatggagtaagtgctaatgttagaaacctttaagtgtccgagacccctggcctctggcgagtagattagaagtaaaaggaattgtcagggaactggcagtgaagtccagaaaatttcttttataaaattttttcctaaatacagaggttaattcatgcttgtggtaggtagaataattcgcaaaagatgtccatgtcttgatctcagaatctgggaagatgctgctttacaggacagtaggaactttgaagatatgattaagttatggatcttgagatgggaggattatcttagcttatctgggcagtccctaaatataatcacaaagtccttatcagagggaagcaagaaggtcaaaggcagaagaaggagatggcacaacagaagcagaggttggagtgatggagccatgagccaacaaatgcaggcagcctcaaacaacggaaaagacaaggaatagattttcctggagccttcagaaggaactaagcttgatttcagccctgtaagacttatttcagacttttgtcctccagaactgtaggaggatacatttgtgttgttttactaagtttgtagtaatttgttacaggcacaaaaaagaaaactgatacgatgctcgttgcagaaaattaggaaagtacagaaaaagcacaaaggattttttaagccactgtaatcattctgccaaaaggggaaaaaattaatattttggattatggctttgcagagtttttctgtgtgtgtgtgtgtaattatgcatttcacaaaaatggtattgtagtcagaatgtctgtttgagttggagcagtctgattttagggagtgtgagatgtcagatgggagggtcggcatggatgtttagagttctggtttctttacacatgtttgcagtcccttgtctgcagggatgtctgcagaagtatggaaactcttgaaggtgggcagagaatgaccatgtggtggctgtaagagctcaatctggtccctgaagcgatgtctccctggggacactcactttgatgttttctttcttttgcaagcatcccactactacaaatacaagcagcagttcatcttcccaggtgagtttcatgtgagctggaagcagccccttctgaacaagccccgctgcattgcaggagtttctgggatgaatggaggcagatgttgtgggggtgcctaagatcaaagagggtagtggagtcaccacactccaggataatggctgaacatggaagtggagaagaaagagtgggcacagtgggacccaaggaggtcccaaggcaccgtggaaaggcctgagagggtggagtgctgtagaacactgggcgagggtgaggaggggtctagagccatgtggcaggaaagagatggtcatagggtcctgagctgggtactgagaggatgtgaaaccaaggggctttatcatcccaaagggaacccaggagaaagaaagattcagagatgaccaatgaatgcttcaggctagatatttgagggttctggcagccccctattcaacaatgaggaattttgttgaggatgtcatccagaaccctggtccagctgagcaggtagagtccaggtggtccaggaaaggagaaaggagattggccaagggcagagatccaagatctggtgaaaaattggctgccatgtcgcccaggaatcaggcctttgcgggggttgtggacttcacattttttttctgagtgttcaatctctggttttcagatgtggtgccggtgccggagacgccgacccgggcgccccaggtcatcctgcatccggtgacctcgaatccaatgtaagtgagacagagacatcttccccctttcccaagcttcccagccctggccctacaatccactcaggttccctatcttctttccttctcttcctggaactgatggagttgggggcagagggagatgtacaagggggtcagagagacatagggaataacttaggcaaagagaaagggcgtgacagctcagacagagagatggagagagaggcaatgctgttcctcacgagcagctatgccttgtgtctctgaccctgcctgtcaaatgcaatttccaggggctggaccgtttcctaaggacccataacctccctgtgattaggaagaaaactttccccgggtgatagctagtacttaatgaaagggcaattattccatgtcactgaacatggaataactttcaaaagtctcattgaggtttatggaatcagcaaactatagcccatgggacagatccaacctcctgcttgtttttatttaaagttttattggaacacagccatgcctatttgtttacaatgtattgtgcatggttgctttctccatgcagcagcagaatcgagtagttgtaacataatctgtatggcttgcaaagccaaaaatatttactctatgaccctttgcagaaagaaatttgctaacctctggtttatattattataaaaataatataagctaattttggaaaatttgggctattctttaaaaagggaaaggcaaaataatcactcatgatctcaccactgttaaaacttctatgtgtgttctttccatttatattttacatagttatgacccacaatatatgcaagcagctaccatcctgctttgttatctttatgccaaacatcacattttatgaatattattttagcctctccatagacattgttggtttttgttttttgtttgtttgttttgagacagagtctcactctgtcacccaggctgcaatgcagtggtgcaatcacggttcactgcagcctcagcctcctgggctcaaatgatcctcccagctcagcctcccgagtagctgggattacaggtgtgtgccaccacacccaactaatttttgtattttttttttaattttttatttttgtagagacagggattcaccatgttgcctaggtgggtctcaaactcctaggtgcaagtgatcattccacctcagcctcccaaagtgctgggattacaggcatgagccactgcacctgtctgatattgtttttaatgggtgtaaaatgacatattgatgtagaataattttcttaaccattttcctattgctggattttacattgcttcccatatttcattgttgtaaataatgctgcaatgaacatctttgtgcatagcatccttaggaaacagaccctcttttcaggtggtttattgcttgtgcagcagaagtgaagtcaccttggccaggcgcagtggctcatgcctgtaatcccagcactttgggagggcaaggtaggaggatcacctgaggtcaggagttggagaccagcctagccaacctggtgaaaccccgtctatattaaaaatacaaacattagtcaggcgtggtggcacacaactgtaatcgcagctacttgggaggctgaggcaggagaattgcttgaacccaggaggtggaggttcagtgaggtgggattgtgccactgcactccagcctgggcaacagagggagactctgtctaaagaagaaaaaagtgatgtcacaaagtcacctccttaacttctttggttgcgatggaagcctggggcttgctaggatttgaccagtttcctaactcacctttgtgcctacttagtttttcttctgggtcccctaactgcttcatcttttctgactggtcttatggactttgttaaagacttacatggtacatctctgaaatcaaaggagcagcaacttgccgggggatatggtgctgacatctagctcgagatcatttctctgcttcacataaaccaattctacaatttgtgcaagatgaactccaggttattaactgacagtccagaggtaccagcgaaaaacagagtcaatagctgcttgcgatctgcttaaatgtgcgcggagtgatgacaactctttgcagaaggaaatacttgaatagccctggctgctggaatcacgccttgatgcagagaggagggtggcctgttttggttttgggcatgaggagggactccagctgcattgtcccagccaagtctcccccagggcatcaagttctcagcatgtcagctgtcatcgtgcaggttcattccactttcccaggctgtgctatgaataattggttaataccatggcgaatgccactttgtggttgacctttctttctccttcttttagttcttgtggtctttcagactctttcaccaggaccccctccagcaagtggattgactctgtggagtcagccacttcctgcaatctgagggtcaggataggggaggtcccccaaatgaggatggggaagggggaatctactggggaaataggaaaggaggggtggggtattcattgtgattcttttttctcacctgtctcagctcttccatgccttcaatagcccagttctgtctccctgctgcacttcaaaaacacatgcacatcctcaagtctaaaccctgcaacatacctctaatgcacactgtacccaacatccatcacatgtcaaatgtcacatgcatttgacagtcccctcacacctctaatgcacacccaattatactatcggcatacagcatccccctcaacatcctgtgtgtacacccaactcacatgcacacaagacaaccctgcacaaagcacatcccataatacctatgcagtgctcacacaaattgtgacgccccgccagcatctatacccaacatgtttgcttactaagaacagaactgcagctcatgagcttatgaatgcatcacacacacacacacacacacacacacacacacacacacacacacacttgtgtcttccagctcaatatggtctttttattttcattccacacatcctaattccatgtgattggcaagacctacctcaaacactgggaactttcaaatacacccagtaattctctcatcttggaattcccacgacactccatttatccaattcacacctaacttttggccttattacttttagcctccctgcatagtatctacatactggctttagttccttcagtaggaacacaatattcctgaaggtcagaagccgtgccagtttcaattctatatccctccaagggcctaacactgttcctggcacacacatctattaaatagtcgcatgaatgcatgaatgaacagacaaacaagaacactgagatccttccaagaaattccaaatttgtgtgaacttcggagatctgattaattctttcctggcaaacatatacagctctgaggacttatctacccagggcatttaggccaatttataagaaagctgctagataagttgaaaccaaagcaatgaagaaaaatgagccctgagcagcccggaaaatcaacttaaaacaaggtccttgcgcactgtgttgtgtgtgtgtgtgtgtgtctgtgtgtgtgtgtgtgtgtgtctgtgtgtgtgtgtgtgtgtgtgtctgtgtgtgtgtgtgtgtgtgtcgaggttatggattatttcagacacacctgttgaaatgaaatgtgagataaagacttggtggtaaagacctccgatctggggattcttcgtacatagctaaactcaatatatagacctgccttttcacctagggatcacgtttatttttctttctttacagcttggaaggaaatccattacttcaaattgaagtggagccaacgtcggaggtgagaatcagagagcagtgaagcgacattttccagggactgcccagaacttggcaaagccgactgacgttttggatgacgcagagggcttggggtcaggtgggggctgtggtggccctgactgatggatattctaactctgggacaattagcaagcagtggtccctcccagcactgagtctaatgggccattatatggcatgcatcatggaaaagccagttgtgtggaaattgtcaagagatttgcattcttagtggaaagatcagctcagggccgggtgaataccaagggggatgtgccccgctgccttcaaaagaatatgtgggaagaggtgggggcctcagggatgctgggcttagaagtgttgagaatgctctggggcttcttcccacctgcctaagtggctgcagaaatacatgaaatgccctggctggaaaccatggagtcctggcccctcagctctgcaactgctctgggtctcatactgaaaggaattgagtcagggcttccaaggaaaatcgtgttcttttctgggactattttggttgttgaaaaatgatcccgggagaaatcaatgtcccctgtattgtttctcctgaatgtgccatcaggggcagcttgcccaggtattttgggtcaggaagagctgtacccagtcaagaagccaccttctcaggctgtttcatcaggtcccagggtctctgggaatccccgctggccctggccacctgctgctcccacaattctgcaggagaatccaagaggcaattcgcccccaagcacccctagatatcatgctgataaggtgggtccctacaccttgagcatttaactctagtggtagttacgccgaagtacgcctgagtcgtgtgtgtgcatgataaaaatgcagattcctggtcctggcctgcggatattttgatccaatagtgctgggtggggcccaggaatctgcattttctcgggcctcccagtcggtgtttaatacagatggtcaggtctgtacaaagaacttaacaggccttcatctaaaacctcacaccggccctggggcagattttattacccccactttacaatgaggaaaggcagcctcagggaagtaaagcaactggctcaaggtcatacagaggccagatttcagctctctttgtctgattgttaagcccattctgttaacccctcactctcatgtctcctaccctcccagctgctgtaggagcctcagacagctagcttgtagctctgacctctcccagtttttgaatcatcaattccaaattccctgggggaagcaaaagatactccatgttggcagttgtcatgtgttacatgcagatgcacgatgtacccattgttttagcctgtctagcctgtcaactttatcacatgcacgtaaacagccaaaccaaaagactatggaagaataggaaggccatcggatattcaagtccagagacctggatcttagtccctcttctgcctggctgcatgacctggagtgagtcacttcccagggcaacatatgggactttcggtgctaaaaccaggaagattccagcaaactagaatgggcgatccctataacacttctctctgagcctcagtatccccccatttagcacaagagaggtggatgatcatgatctccctttcagcaccttcactgtagtatgattctagaccagattctagagctggggaaacagagggacgtatgtctgcacaagctccaaatgcatgtagagatgtgcccagacctacgcatgtgcacgggacccagcaggaccatgagggaggctggggcagtggcagacacaattctgacctctctcccactccggccacagaatgaagaggtccatgatgaggccgaagagtcagaggatgacttcgaggagatgaacctgtccctcctctcggcccggagcttcccacgcaaggccagccagaccagcatcttccttcaggagtgggacatcccctttgagcagctggagatcggcgagctcattggaaagggccgctttgggcaagtgtaccacggccgctggcatggcgaggtggccatccggctgattgacattgagagggacaacgaggaccagctcaaggccttcaagcgggaggtgatggcctacaggcagacacggcatgagaacgtggtgcttttcatgggtgcctgcatgagcccgcctcacctggccatcatcaccaggtcagttccacctgggcttctacccagggattggcaaaactctgcttctggcatggttgagaaatggttttctgcttacttgaccactctggttaatagaccatctctagttctaccatgcacagtttacttacatggtttaagatttaagattccagaaaatactttacttatttgtttttttagagacagggtctccctctgttgcccaggcttgaatgcagtggtatgatcatagctcacagcagccttgaactcctggactcaagagatcctttcgcttcagcctcccaaatagctggcgctacaggtgtgtgccatcacacctggctaattttttaattttttggtagagatggggtcttgctatgttgcccaggatggtctcaaactcctggcctcaagcaatcctcctgccttgacctcccagactgctgggattacaggcctgtaagctaccacgcctaaccccagaaaatatttttaatgctaaaactctttagcaaaaccaaagactactaaatggggaattagaaacatcgggtctagttccccctctattccaagtatttgtgtaacagcttctccaagagtcactttctccatatgtgaaatgagtatattcaactaaatcaggagtcagccaacttttttttgtaaggggcccaatagtaaatattttcagctttgtgggttgtacagtttctgtagcagctactctactcaaccactgtagtctgaaagcggctatagacaatctgcaaatgaaattgcagggctgtgtcccaataaaacgtcatttacaaacccagggagtgggctgtatttgtcccatgggccgtagtctgcaaacccctgattaagattctttttctttttgagacagagtttcactcttcttgcccaggctggagtgcaatggtgtgatctcggctcactgcaacctccacctcccgggttcaagcgattctcctgcctcagccacctaagtagctgagattacaggcatgtgccaccatgcctggctaattttgtatttttagtagagacagggtttcgccattttggtcaggctggtcttgttcacctgacctcagatgatccgcccgccttggcctcccaaagtgctgggatgacaagcatgagccaagattctgataagtgttactctggttttcatgaaagttgcagagcacatttgctgtctttaccattgtggtttggaatatccaggatctgtggtctatgggtacaaagaagggatagttcatagagaactaacattgcgaaaatgtttcttggactttctcagatttgctctctggcctctcccagaggcttgaggcattgggagaaaaatagctttggttttgatggaacagttgtgaaacaatcctttggtttgtttttaaactctggcgctgactcccctgtaacataaggactggcctctgcaatggcattcttagtatgacctgtgatgccaaggggctgttaggagctctctccttgctctactcagctcaagcagtgagaccccaaatgcacaagtcttgcatcttaccaggcccagaacagatgctgtgggctcagagaagagctggtgtgtctttgatctcttcccttgtgagacaaaaccttcttaagtccacttatgagaacttggtgattggtagaaggtacattatattctgtatccatagatgatgcagatggtgggttgactggagtgactcgtgctttgaatgataagcgctggtgaaagattagagatctagggatgggcctccaagcctccttaaatcagggtaaaaatggtggttctcaactctgcacaagacagaagtggctctgaagcaatcagcccaggtaatcttcaggggctgagctgttctgagtttaagcttttgctgagtactactccacaacttagtggtttctctctatcctatggatagttctgggctgagccagactcagtagctgggttcttgtagttggctgtggtcagctctgggtcaacaaggggatagtcagtcttagatgccctcatctgtgtgtctgctggttggcagattgtcaggggatatcctcaacaggctagctcaggctcattctcatggcggtctcaggtttccaagtgtagcaagaggtcaagacctacatctgttggccagagcaactcctattatccactagattcaaggcatggagacacagcctctacttctgaatgggaagatctgcaatgtcccactgcaaggacatggatgcagggtggggacaatctgtggctatttttgcgatttactacagagaggcccttagctccctttccttccctttcttacccagtatatatcatcatcttttagcagcagtcaatagcctattacttgggatacacaagtctggttggagggtggtcttttccccacccctggccttctctccattgctcccatcttaagctcttatcccatctttctgtctggtcagttccttaccaccctcctgcctccctgttcagcattacctatgaagcctaatccccatgcctccctcacccccttctcaaaggctagcaagttggaaatagacaaactcagcagccatccttgaaaaacgagtggtcattatgaaaatgtgttgctcatcctgcaagccagctgcatttgcggccctcttctattatgtacaaaattctgagcccccctccccaagcgccataactgcctacagatttcacaaatagcccagccttttcctggcaccacgataaagactctgcagctttgggatgtgtaattggtctctgaagtgttttggtattttgtgtgaggatgccagatgagccccaaagaagtggcattgattccatattattgtgttgttatatatttatcttagggaggggctctgtgcatccctctttctgttcagcactgtccacttgttggctctccaggtttcttatctgcacgttcagtttgaaaccaaatatttgagtaatttgattaatcacttgcattcgcacgattggctggcagaggttgatggttggacaatagccaaccaactggaaccatttttggaccctagatttattttacagggaacataagaccagataattacctggcatattctggatcaattcacagtggcacattctagccaattacttagtaattatcatcgaagttaacaagtatttctaagattagcttccttgcaatgcaatatgtgtggctcttggggaatgagtaataaccaactagttacccaattgctatagccacaaatgctattagcagcaggattgctaaattgtttcacaattgggtcgttatgggattattgcaaagctatcgacggtctgcgcaatcactcatgttaaaaactccaagtgaaatctgaaagccaatagagttgagtgaaagtgtctctcacccgtctaccttgctacctagggtttcacaagccttagtttctccttctgtaaaatgagcaggtggaagcggatgtttcttgcagtgtcctgccaactctgacagtattctttgcttgtctgataatgagctgtgtttgagaagcagctgggaacagtgcttctcaaagatggcgtacctggaccttcctgcaccagagtcctaggagaggaaagttgtaaaaatgcagattccagaaaaaagactgtgatggtggcaggtgagggcaaaggggagaaggtgagggtagagaagctgtcaggagcaagactggagagggcaggggttctcaagcctggtggaggaaggggagcttttaatacagtaacagtgcctggccctgccccagagcagagtctctcatcttcagcactactgatatttggggtcagaaaagcctttgtggtggggactgtaggatgtttggcagcgtccctggcctctactcactagatgccagtagcactaagcctcaagttgtgacaacccaacatgcccccgagacattgtccagagtgcaggggactctatcacacagccaggtttgaaccctcagttatagaatccctggtgaggagtcctgattttatgccaagggcagtgagcagccgttggagggctgtaggcaggggtgtgacatggtgttgttggaggacaagaatgaggaagcctcaaaaataaagggtgggtgcacaaagggagatattttgcctagtgcaaaggcaacgacagtttaaggaaatgatctgcttatctgccctaacttcccattgtaatcaaagggctgatgatcttggtggacactcagtgtccttgctttcaccccattttgctgccctcggtcagactggcaaaccctgtgttatgaagatcaccatattagggttgctgttctgacagtgggtaaggctctgaaccagcagaagccaagccatgctaggtggcatggctgagcctttttgctgaaatcagttccctggttgtggggtagaaccaagacagagccctcaaaaataaaccaaaaaagcagcagattccatcagctttcagcaagtgcttcgcttcaggccaggcgtggtgaggttctcctatttatccttgtgcctattttacaggtgagaaaactgaggtcagaaaggcagagggagcccttgcccaaatcatagaacaaataactggcagaactgggactaagcaaatgtatatctaaatactagtctggtaggttccttctttgccaatggccgccttagctacaccaaggggaatgggctccatctgtgagcactttggtgacacagagattctgcatttttggtcatatcacaatcacctggagaaattgatcacaattcagggctgaggccccatcctacttcaattagcttggacctctatcctttttagtaagtgccaggggattttgttcacgccacagtttaagaaccactggcctattagaactgagtttcatttttgtagccttgattttccggtgtttatgtgcttctccaataccctgtaaattcctgtggcaccagcacaaccatgcacacacacacgtgcacacacacacacgcacacacacacactcgctcctcttctatatatacgctaaattacacaccatcttctcttctttctctcctgttctctttcccacatcccctcaaagaaatgcacacactctatctttccctgcaaaacactcattccacaaatattagcagctcacaaaactgctgtgcagaactcagagaacgtacagtccctcacagaagcccccacgtcacccccttccccactccccaaattattttgtagaactctaaaattatgtaaatctgtgcttcgtatcatgtggttccctaaccagccttacctgtgaacttgttagaaatgttaattctctctcccaccctcccccgctgaatcagaacctctgcgggtgtgtccaacaagctgggttttaagaagccctatatggaattcttgttcatgctcaattgtgagacctgctgctttaaagaaagcgggtccttcctcccacctggagcaaactgcctttacaactgccaagagcttcgggcacaccttggaaacctcttctctcaggcactaactgagaggtgtgcagctgagtccaaaatgggtgagggcctagaatgacccaatatcagcacctgcaggggcctgagagccatctgttagcttcagtgctagcacattccactaacgcgccttccacagacattcatcggaccccggcacagtgccagaccacatgatagacactcagaacacagtgtctacagtttgtactgtggactttgcattccagaagagacagacaataacaagttaaacaaacacgtaagatcattaaagcatcgtaataagtgctgtgaaggccacagtcagggtgatcgatgggtcagagtgatgggagggctactttgaagaggggctcagagggggcttcataggggaagtgacatttgagctaggatctagcaatgaagaggcattggccatgccaagaggcagagaaagagcagttcaggtagaggtactgcaggtgcaaaggccctggggtaggtatgagattggtacgtttgaggagctatagaaaggggctgcagaggccagataattgcaaggctttgaatgccatagaaaggaatgtagtgtttatcctacggcaatgggaagcccacgtaaggttttaaatggcagctgcccacgctactctgggggtttcctgatggccaagatcctacctcctcttgcactcagctggttggttcaatgtgtcaaaatgcatatgggttagaatagtgatggcatcaaggaaacccagcgccaaagggcacaagccaagagaaaaggctctggggtatcctgactgtcagtttgccatttccacctatgtggggctcttaggaacgataccagtgaatttcatcaggatcctttcccagggattggggtaggatggggcgaggtattaggggcattacctaaacatcttgtaattgaggggctcagactgtgtgccccaggaaaaaagaggaaggaagaactggatttccccatgccccccaggatgattttttaaatttctcatttggcgcatgtcaccaatcccctcgctgggttcccagagtctgagaggcatcttctcagttatgtgaggttaactgttgcccgcgtgcatgaaatatccagcacttacccatctcctagggacaaggtagtaatgaaatcccatggggcctcatttgcacagcattttaaatccagtaaatatcaggaactacttaatagattatttatttccaactccaaatcagttcctgttttccatgctttcaaatataatagcaccaagctgctatatttgacagatgcatggagaaccctgccttctgttaaggtggtaactccatcaacttgctttttctgtaactcctgtacttgtggtctttctaatttttgtttctcttcaggccagtttgattgtcctaaatataacgtacaggagttggggggcctgagcacatgaagattccgtccccatcatcgagtggaagcggcttccttttatgttcaaaaagctgaatcgctttccctttataaagcacagctgaaaaggttttttgtctgtggctgcctttaattgtgctgaaatgtaaagcaccctgggacttttgtgaaggaagcgctataaatgtacagcatcattatcattattattatcagcatcatctcatgtacattgcatacgcctgtgtaatccatcctatgagcagcagaggatttgcatggctgaagacctcaccactggccaccactctcctcgaatctcaaagatcctgaattagcacgtgtgacatctgtcatcactttaaaaaactgtgtatcttattacacaagtgaatgacttgtttgcaattgcaaatgcagatcagcagaaagaagaaaatgaaattcacccataatgcctccagccagagagaatgacattaacatcttagtgtatatccatccagggatttgtcccagaatatgtgtaaattcacactttgtattggtcagggtaatggtagctgctgtaacaaataagtcttaaaacatgaagtggtttaacgcaatataagtttatttcttgttcatgtaatagtccaagatgcaagtttttggatggtaggtggcttttctccacgtatggggggatccaaaccatgtccttcttttggatttgccttcttctaagctgcacagtcctctgcctctagctgaggaaaaaggaaggggcatggaacatcctatggaggggggtggtctgtgagccgcctacaagtggtacacatcacttcacttatgtgccattggctggtgctgagtctgttggccatacctaactgcaaagaagactggaaaatagctaactgtattcccaggaggaaaacagtgggatttatgaacagccaggagctctgagacacacattcatctttatggatagatcttcttctcccatgagaaatagactcataccagcaaccctgtttcatgacttgctatattcactaaacagtatgtgtatgaaacactcccctttggcatttgggtctattgcaaatttcttcactcctgcttgtcttaatttctccacatatagaatggggataacatttatctcttttgcaagatggtgataagaattagagatgtatatgaaaagactatagcatagtgcctcctgtaactggagtgctcaataacttttatctcctataaaatgatgctataataataatgatataataacaacaataataataatggtagcagcaaatggtagaagtcatgtattttctctcaggtgccaaaacatctttgacactacaaacagcaagtgttttgtgtttattataataccaaatgataggagtcagtgactgcagtttgattgcttggatttgtgtcccagctgtgctcctggcttgcaccctggccaagttactgaacctctgtaagctttgagccatccagagggagatctcgagtagggagctagatatcctggtctcaagcttggacgaaaggttgggactagaaataaccatgtatgagtcatctgcatagacatggtgatggaagtcatggacttcttctgaagctgaggtcatctggggaaaagaggagggttgcctgaggatgaagcccagaccacctgaagcccggaacacctgcagcattgtggcccggttgagatgggaaattctgcaaggggaccaagaagaagtggctggatggtagaggcaaccagaggagcatgaagtcaggaagccaacccaaaattgttcccactgtgcagcttctcccatctctgtctcctcctattacattgctgtgttttattttatttttgaaacaaggtcttggtctgtcacccaggctggagtgcagtggcacaatctcagttcactgcaacctgcgcctcctggattcaagtaattctcctgccttagcctccccagcagctgggattacaggcacatgccacctcacccaactaatttttgtgtttttagtagagacggggtttcaccatgttggccagccttgtcttgaactcctgacctcaaatgatctgcccgcctcagcctcccaaagtgctgggattacaggcgtgagccaccgtgcctggcctgcattttattttcatcaaggtgcttctcatcataagataattattattttgttcttctatgtttgctcacttactttttcccctgcattccctcccccaccttagaacataagccccaggagagcaaggatctcagctatttgactcacctctgtatccccagcccccaaaatactaggtcctccatacatacttgttgaatggattaacacatttacaaaaatacattcacacacattagcacagcctgctcctctaggcaagtgtagcagcagacaatgaatggtgctatttacttagaatcactgggaaatgagtagacataaagaaaatatagtacgcactggagggatgactataggatgtgggagaagtaacagtgatgaaaagaaaagagatgccaagtatgtgatgtaagttataacagtgcagtaaaggagtatttccccactcacttactgtgtatagggtccagtgcctgatgatggaaatagagagaggaaggcatgatgtctgcccgtcatggagctcacagacaaggaaattaactggatgattctccaacggtgtcgtgatctctgcaataagatcccaggggtacatggggacctggaacctgccccttatccaaccaagtaattaggcagatggacaagaagggagtgacattcctaatggaggggacagcatatgcaaaggcttagaggtaggaggtagcaaggccaggggaggggcaagagctggagtagaggatatatacggggagtagcaagagatatgaaactagagagatctgaccgggtgcggtggctcacaccggtaattgcagcactttgggaggccaaggtgggaagatctcttgagcccaggagttcaagaccagcctgggcagcacagggacaccccatctctacaaaaattaaaaaactagccagatgtgatggtgtgctcctgtagtcccagcgagttgggaggctgagacagaaggattgcttgagcctgggagactgaggctgcagtgagaaagccatgatcataccactgcactccagcttgggcaacagagtgaaaccctgtctcaaaaaaaaaaaaaaaaaagagagagagagagagagaaaccaaagacatcttaaaggacctttcaagtcaggctaaggaacttgaacctttctcccaaaggcagtcaggggagccacccagggattaaaccagaggagggacacagtctggtttgcattttataaagactattttgggacattccctcttcttaagagagcttgcagtagggttggtgatgtattcccctcctccaaaaatggtgtggacggttagtgttgctcctaatcagacattagcaggaacaaatgcaggcttcaatgccctaggttctaagagatttttggcatgcctcccgtaggggaaagcaacagggagttggcaggcctttggaaatgaaggcattttcaacagctttcactatttaccaacgttaaaaatagccagctgcatttgcatgttttgaaggcaagtgtgggcaacatcgggcccttaccatgtgttccagaaagcaaagggatggtttcctcagtattgccggcaggcagtggttaaacaaagatttgggagtatggggacagctttacatagggagacaacgttgtaattaacaaccctctgaagtaggtaccatgcaatccatttccttgtctgtaaataggggaattgaacggtacctacttcaagggatcatgaaagagattcaaaaaacagaaaaaccagtaattcatgcaggttggtcagattgcagggaatcagcttttaattacgattttgcccaaggtcataagctaggaagagactgtctgattcatactgaagcttgtatccatccactctctcgtcctctttccctttctagccgtgcctgagtccatcccactttcttatgtcccacggacaccttaagaactccccactgctgggtcccattccctgggaaggacaacaactgacctacctccaaatcaggttcattgtccaaaccaccaaacctgcctggcttgtgacttgttgagttggcagcaggcacaaattgaaaccctgccacttgtccctttccctctccttccccagcggcagatgctggggtggtgagagtgggaagggtaaaatcagtgtgtctgcactgttcagaaacttgctgggccccagactttggtttgatgtattcccaacctggctccagttgcttgatcactgctcagctttggccttgccccctgcctgatcatgttcaagataattaggtccataaatcaaataataaatagatattgactccttgtcatggagtatatcaggattgattgaccactgggaatactgctttcctcaatcaatggagagctgtgaggataaataaatcttgataatgactggcaagaggaaaatcaatagatgtattaatatatgcattgagatcatatatctttgtgacataagaatttgtttggcagaagagggaaacgagatggagggaggacagacagaatgactcagtatccccagactcaaacacagcacctgcacaaagtaggtgctcactgatttttttgcggggggaggggtgggcggtgaactacagaaatcctaggagaggttttcctccaagagaaactgtatttagtgtttgctttttttgttgtctagatgtccagtgcccagaaatcccttctgcctatgggcagcaaggttctgttaatgtttggccttctggtgtcactggaagaaaatagaggagggaaaggtgggacatgatgtcaggttgggaccaggatactgaagttaggctcagggagcaaaatcaggagattttggttggggatgttgaatgtgaggtgcctctaagtctaagtctattaagaggtgatgttaagtagacatttagatatctcgctgttcagagatgagttctagactggagatattagcctgggagccattcatgctgggtggtattagaaagcatgggtattagaaggcatggatttcacactgaaacgtgcatcagaagcttatggagggcttttgaaaatacagattgctgggtcctacccccagagtttctcattcagtaggtctgggaggggcctgggaatatgcactttaacaatgtttaacagtcatcccaggtgatacggatgctgcaggtctggggaccccactttgagaaccagcagctttgttaggggaaagaaaaagctgagaagagaagaggacgcagcattcctgcaaggaagactgataggaacaagagaattgaggaaaaccaggaagagggtattgtcatggaagcttgggacactcagtgtccagcaaggggagtggtcagcagcttagaggctggtgttgaaaggacaaatgggatgcaactagaaaaacgtccctcagaattcttgcagccttaacatcttgttaggctgtggttttaccactgcatgcagacttcctttattcacctgcccagtgacatttgacatctcaacctgtaatttgataattcaacctgtaattgcataccatgtacatttccagtgtagggctagggttcagttgggagtggagctcttcacccgctgaaccaggttagtgggactatttcagttatcggagtcatcggagggatcaaggacagaactggaagatcctttcccagcaacagttcccagcaaggagagagctaaaattcaccagaatggcagtgtggggtcgctgagacaggaaatgcattgacttccaggagacatgtcctctctggggactgagcagtattgttttccaaactgatcattgatgtttgccaccactgtcctttaaaaatacggaagggaagttggtcacttgggcgaatcatttttcatatgaaagagggcttccttgtgaaatggcactatggatatttattaagggaaacagattccttgagcaactactgcacactaggcactgtgctaaggactttgtagatactgctttttaaaatcgttatcctgttttacagatgagaaagctggggattagagaggtaaggtggcttgttcaaagacatatagctggtgttaggctaagctagggcataaccttgacctctgatttcagagcttgagtcctaaccctgccaggctgtactgggtcatcttaaagaatgcataaaatctttgtttggttattctttttggctattctccatgccttcccaagatgaatttcataggtcattgccgtagtctggccacttctcttactcttgggtataaagtaaaatttgtaagaattttctgccatatagaaattttgaactggaaagaaatgttcttccacatcagagttgagcacctgtgtgtccgccagtgcctggccttgtggatcatcaggaaacagaagccgagtggtcaccaaaagagcctgtaggggaatgcttggtttgctagttgttctgggtcttgagtaattgaactttagtgcagatttgcttacacaagtttttcttttgtgttggtaatcacttagactgtctgagcctcagtttctgcatccgttcaatggaggtagtaatagtctaacagtccctaccaggtgggataaatgtgaagattaaatgaattgatagacataaggctctgaaaatagtgcctggtacacatcaagtgctagattagtgttgacatctgctgctgttgttgaggattttttttttttttttttttgagacagggtctcagtctgttgcccaggctagaatgcagtggtgcgatctcagctcactgcaacctccacctgccgggttcaaacaattctccagtctcagcctcccgagtagttgggaccacaggcacatgccaccatgcctggctaatttttgtatttttggtagagacaggatttctccatgttgcccaggctgttctcaaacgcctaagctcaaagcaacctacctgccttggcctcccaaagtgctgggattacaggcatgagccactgctcccggcctgtcgcagacattgttactgctagcactgtatcacagggactcaatggaggtgacgtaaatacaacactcttgtcccttgctgcagtagaaagaatattgggtatggagttagatgtcctggatgaatgttctagccttgtcacttgctggctgtgtcaccttggacaaaatcacctcacctctctgagccttagtgttctcatctatcatgtagaggtaactgtgtgcatttctctaggtggttaggcaaaactgaaaattcttcataaagtaaccaagactacagaaaagtggaataatcttttaaatcacgtagtaataataatagtttaagaagtattgactgtgtgtccagaactgttctaagcactttgactttttccacgtatcagtgggcttggtgcttttggtattgatggaactaggatttgagctcatgcctgctgttgtcaaagcaagtatacataagcaccttatcgctgaagagaactttcttcttgagttggcaggtgtaggtgaccaaaatttaaagttagaactgcaactgaggggacccacagtcagcgcctctgtagtctccagggaagtgtctgtccttgctctgagactgagtgatgagaagcagaggcccttctccccagccctcttgtcatcttctccctttgatggcagtagaaagtatgcagctgagaagtcactcttgctttaaatcaaaagattcgacttcgagtcctcttcaaaagaagattgtttcttctaggtgtttaaaagactgagaggaacctcgagaagggaacagatcaggtatcttcaaaggcaaagaagggggtcacaagcatcctcagaatttccccagctgagaccagtccctccaaggctgttattagcacagcccttcgggacttggaggtgcagatcaaggattctcggcagacttgtttggaagtgtttgtagaccattgaggactgtcagagcgtctcagttccctgggtctgatctctctctgagcaacaagggctgcctttgacaagttctcatagcactgaagctcagtggattattattctatcttgtcaataagctgcagttgctaggctcagctggccttgcagcccttccttctgcagggtttggtttgtgtgctttcctacctccctgctctctttctttcggtcccttttccagccttggtgctgccctatccctaggccttatctcaccacctggctcctgaattggaggggaaaacacggtgctgtttgcctggcattcagagggttgggccttccatcaggtgctgaatgcaaagagggaaggggatggaaggaggagggggccaagaattcacgttcttcttctaccactgtgtgactctagacaagcctttcaaccttctagctctgttttcttgtttttgaaatgattataacattatctgcttcatctttagctggaccatgtacctccttgtctggacctgtttgacctaagctgaaccctcagaagtgaatgatcacgcatccatccatcctcctatcagttcaaccatcttatatcccccagaccccttacctgtccccctgcccatccaatcaccctctgaaccatccatctattcaatataagcccacctaccatccatccactcatccatcccatccaccccatccacccacccaccctctcatccattcattcaacatccatccacccatctatccatctacccaccttcacatccacccatctgtttaacatccacctatccatctacccattcacctacccactaaccacctatccagccacccatccatctacccacaattaacctacccatccactcatttatctacccatgcacccaccctctcatccattcatctgtttaacatccacctgtccatttacccattcatcctgtcagtccacctatccacttcccacccatccatcttcccaccattaatctagccatccacccatccattcacctaccctctcatccatctatctgttcaacacccagctatccacctacctacccacccatctgtttaatcaccattaatcaatccatccatccatgttcccactctccaaccctcccacctatccattcatgcacccatccactcacccatcattactctagccacctagctgttcagcaaatagttgttgaaatcttactctctaacgtgcaatcccaggtgctagaagtttgtgagtggggcttttcttctgggatgtgatggaagcatgccgtgtgtcacaattaaagccgactccttgaggcaagacatgatggccagtagcatgggaaggctgtggtcagcatcattctggtatcacgtgtttagagccaacaacaaataagtctaggggagcatcagtagatgggaattttagtgaactgcacatctgtggatcacattccctgatataaacataaaacagactccccctcaaaggaaaatacaggcagcaggactaaaataatcagaattgtcttttcctgcaggtttccttccctttggatctaacttttgtggaacccaaggctgatgagtgtagaggtctaagaccctgggaagatgacaagggagggtggctttttatctcagcctgggaggtgatgataaatggaggggaaaaggataggcttgggccacggggacagggagagaaggtgccagtttagcaggtcctgaggtagttcagcctgatttccaataggagtgggggtgggggctgctcactgcctattttataccccattaactcccaactcataacaatttatcagcaatcagcagcaggctggagtttacttactcattatttatagagaaagtgtttgctaagcaaatcagtagttcaaacaagatcgcaggggggtaggtttaacccactcaagaaaaccaatcagaataagagcctcagcacattcctgtctgaaggcagatggggctgctggtgacagaaggacaccagccagccttcacggcccttgctttgcaactccagaagccttcactttatctcaaaatggtctctaaggagtacaccttggcctctttcttccccatccagtctgaatttgacatttggctttatgttgctgtttcagtagcctagtaaaagcctttggtcaaccctagaaagaatgaatgtcctttggggtcaagtctcaaaatcaggacccttaaactcattcccttattggagatgaatggccatggccttctttaagtgacttaaagacctctggtcctttcatttcaggaaagcctcttggatttgaggttagaagacctagtttgccatcctggtgctgaatggccttgggcaagtcacttgggttctgtgatcctcagcttcctgctgtatagaacgggcacactgctgcccatcccacagagttcaggcagtagattaaaccatgtaggtgaaagtgttttgtaaacagaaaaatgcaaagcagatgtgaggggcaaatagtgtttcaggtggattttaatgaaaatgagagacttttttcctttactgaatcaaaatgagtgttttcagcttttccagtggttggcaacctgggtgaacattcgaattacctgggagttttgaattctaagtaatgcctgggctccaccctcaaccccaaaagatcctgattcagtgaatctgggttggatcttttatttatttatatatgtgtgtgtatacatatatatacacacacacacacatacatatataaataaatctatctatctattgatctactgacatatatatatctccaggcaatcctattatggaagcaggactgggaaccactgaactattcccagaataagccatgccaaaccaaatttctctttcctcccatctcagagtcagaactgcatagcactctggaatcctatagactttggtgcagccccatctctgtcacttcctggctactacatttattctctaaaaaggtgtgtggtcttggcagctatgctgggaggaaacagtcaggcttgtggatgacccaaaactcttctgacacccaggggattttatttctcaatctctgaagcaaacagactgtcacatgcgtgcaccaaacagggatggaaattgcaacctgaaattgacaactcaggaaaaaaatatatcaatgtttgctaagtagagaaagaggtgatattggctggaaagagaaatgtcattttcaggctgccaaaagagtattaacatataatatggagaaccaataaaatccatagtctaattcttccaggctgcctggttgaaataattcacgaaattgcatctgaaagccttgatatttagctcctaattttgacagagaagatgtttcgttgggcccaatactggtgacatgtgtatcgactttgaagattctttcttagtggtagaggatcaagatctgtgtcccgtgatcaaaatgttcagaaataactttgttaataatttgtgtatccattcattcacttgtccagtcattcatcaaacatagccaggaggtagtaggtactggagctgcggggctttataagacatgcttgtcctcagtagcctctcagccatggggaagataggaattcaggaatcattatacagggaaggaagtgttgaaacagaggtgtgcaaagggcatgaagagaattcagagaaagggactgactgagtggtgaaatgggctgtttcttgtggaataagacattttggaagaaatggggattagaggaagggtgttcttggtataaggaacagcatagacagaagcaagaaggtggcagaaaaaagaggtcacatttgcaaaacttcaaatagctcagttgagttggagcaaatggtgccaactgggggatatgcagtgagggacaccaaagcctaatgtatcctgactctcctggatgagtaattgtgataagaaaagtggatagttgagccttgtcaggtgctatgcagtgtgctgagcacattatacatactttacgctattggatgcttgcaacctgagaggagaatgtgattgtcactgttttacagatcagactccaggaaatgttatttgcccagggttccatgggtgtaagcaacagaagcacaattctgtttgagcaagaggctggggtgatctgatgaaaaataaaagggcatgaaaacaaaacgtttgggttttggtcttggagggagggcgacatccaccatgtgctgcctctagggtttgagttaaacccatttccttgatggaaaatggggccagctattcccacccaccttcagtgtgctcaacatgatgtgatagcttccacgttggtgaggggactgcataaggactgacacaaggtcaggattctggtgcgggccaattcacaattgccaagacacggaaccaacctaagtgtccattgaccaatgagtgaataaagaaaatgtggtatatatacaccatggaatactactcgtccataaaaatgaactaaatcatgtcttttgcagcaacttggatgaagctggaggccattattaagtaactcaggaatggaaaccaaacaccatatattctcacttacaagtgggagctaagctatgaatacgcaaaggcatacagagtgatataataggctttggagactcggaatggggagaatgggagaagggagtgtgggattaaaaactacatattgggtacaacatacactattcagatgacaggtacactaaaatctcagaatttgtcactgtataatacatacatgcaaccaaaaaccacttgtaccccaaaagctactgaaattttaacaaagatttttttaaaagattctggtgctgggtgggctgtttgaacagtctggctgatcttgactctttttgtatatactgtggcaccagtcccagtcaccccttcctactaaccttcccagagcatgcaaaagcacaagaaccttggatatccaggtagctgggcatttgcttgttaagatccccatatctccaccctccacacttcatagatagaagctagagtgcctatggaatttttaaggaggcctgagaggacaaggttaccttggtgaacattgggaaataattcttttagtgccccggagttaagagattaagggaaaaaagaatcccagatgaactcaagtgatgatttttgctcatctttgagaaattggcacaaacttatattttgtccctgcaccttctaaattgggttttggggaatgacaggactttcaattgaaacagattaccaaggtgagacttggtggctaatggaaatattcgtaataggattacatggagttttcatctttcccatgaagatgcaacattgtcacatgacaacttttggggcacagaacccatgtttttaatctctctggacatttattttctgttttcaaatgattgagaggtgaggtcacagccctagagtggcttgctttctatctgtgagaagtaggagaaagctattaacaaaaaaatgaaattgaatctcaccaagcacagattcccatttgcctgttggtttttaaaatcattgtgctgcccatttatgtacaaatagaggtaagtgtttgtgggcatttggaaaagaactacgttttttcaacacaaaggaaaatacaactcccatcccagagtttgctttcccaaaatagtgatgtttattatggaagtttgatcctagctgcagtctcttatttttgctgattttgctgttgtccctgtctgtcttcttttctcatggcctcactcactttgtattttggggtctatcaatcaaccataattgtcaatattgagtgcttttaatgatccaacctctttgcatgtccttttaggtaggaagggataggcttgtgctgcaatgacaaacaaccctaaaatctctgtgaacatttatttctcgctactcagaacgtttatttctcactcatgtaaagttggctataggttgggcaatcctccagggcagctgtcttccatgcagtcactcagggattcaggctgttctgatctagtgggtctgcatatcatcctggagcctccttggtcgtgggtggcacaagaaaagaaagtggggattgagcaatgcactttaaaataccccaaccaggccaataaaaacatcctacttttcactggccagggccagtcacatatgcaacataactgcaaagagattggaaagtgtagtctcctgagtgcctaggagcaacagggaggaagatctgatgaacactggtgttgtctgtaccacatgaatcttctaatttaacccttccagacctatgacatagactctggtctgtctacctgcattgatttttaagcaactttcccaaaagctcataggtaaagaatatcaaaactgggtctgaaacctggctttgacttcaaattccaagctcctaacctctaggtgctactgtctcccctaataagttctctcccctctccactctcatttctgttcctccttctcaaagaaatgattcctgccagcacactcccctggcttcaatttttctccattcctcttggggtaatgaaatgatagtttgttttcctctcagtgtccgccccaatatcttgcccacccaggcctcttcaaatctcctaggtccttcaagttctatttacaaagcttcgagagcaaagaacacaaatgttctttgttgtcaggccagcagaggcatgggttgttgaaactggaagaagttccttccctggttgacaaagctgtgaaatcagggtgttttatttttacccattgcctggctcagggctcctcagcaaaagcaacaggaagtgagttgggaattttgtaaacttccatttgtttttttcttttttaaaacaactttattgatatataatgtatataccctaaagtttagtcacttaaagcatacacagtgtcaatagtttttagtatatttacaaaattttgccactatcaccaaaatctaattttagaacattttctctctcctcaaaaaaacggaatcgattcgatacccattaccagtcattccccactaccctcctcccaactttccccacccctaggcaacctgaagttctaattttagacaaataattgattttcttattggagcatttcaaagtccagggaaaatgcagacccagagtgctttctgagggatgagaaaggccagttctgcagttggcatgatggaacccatattgctgtccccaagtcaggtcacaaaaaaacatacagatacatagacatagatgggcacataaatgcaaagacccctacacacgtgagtgcacatacatatgtacacacacatgcgcctacagtcatgcacatgcatgcattgacatgtctttatgtgtgttcatgtgtgcataaatagtcacagacgcagacatacacctgcactcagaaacaagaatgcccatgtaaatacctgtgtgcacagacatatgtcacacttgtggcttttgatccagttacagtgattccttgtgtggtgacagtgggtcaggtcatttcctcccaatggccgttttgaagtcagtggtctgtaagaaagacattctaaagcaattttggatttgtctcacttgggtgaacatttgtccagctaatttaatgtccaggagctgcctgggaaggctctgtgaggatgtgatataggagtttgggcagggaattagggaaaggaagaggcagaaaacatggacttgacatatgcttccacgtttgagtgattgtgtggctggggcacgcccctccctgatgggtggcagcgggtagttcagtctgtctccaccttgcgtaacacaggcttgcagataagctcccttatttggctacatatgcactggcccgagttcaagttccttctccctctttagcccaactcactcctaagcagaaccttgtccttagacctatgacacttgctggctctttctcatgtaatatgtgcctgcccaccagactcagtatccccacacctggcacagtgcctggcagggctctggaagtgttagctcagcacatgcatagaggcacaaatggttgactgagtgagcaagtgaatgaatggaaaatccacgtgaccttaaccgcaccccaatgcagaggagaatggctgaaattgaagaaagcccttctagtttgagtagcccaatttctgttggctccaccctgatttcttagagcaggggtcagcaaaccttttctgtaaagggctagacagtaaatattttcagctttgccatatgggctttgttacaactccttaactctgctattttaacatgaaaacagctgtagacaatttgcagacaaaaagtatggctgtcttccaatcaaactttactatgaacactgacatttgaatttcatataattttcacatggcacaagatattactcttcttttgaaattgtttcaaccatttaaaggagtatcaaatcattcttagctaatgggtcatgcaaaaaacaggctttgggctacttttggcccgcgggccatagtttgcaactcccacctcagaagcctgattctaccaagcctcagtatctgcagtcttgcaaattctacactctgcaaacccttgacctacagcagtctgaatagtgggctagttgggcatgttctggggtggcccagcgctcgaggccttctcagaaaagggggaggcagtggaaggcccaggggctttggtcaaactggacccagctcctgctgcatgtcctggcagagaggattactgggcaagtcattcaatctcttgagccactacttcctcattggagggacgggaggatgaaaagctccccctcagggctcttgtgtgggtagaatgagtacaaggcttatctcaggagcttgggaaactttgattcccttgttcctcagcctctgttccttccatttccaaagaggccatatagcttagtggttaggaataagatgctagtatcaaatagaattagggtagaatgccagttctgtctcatatatcttagctacatgaccttggcaaatgacctgaactccttgagtctcagtttccccatttgttggataggaataacacctgtcttatggggttaggttaggattacaatctatggatatgatttatgtaaaaccttcagcagagtcctcgtggtgaggttcagaaatgccacttattattctgagaaggcagcatagctctgtgtctacaagcattgggtttagcttcagacaaagctgggttgcagccagcctgtgtcactctaaacacaaccttgggaaattccatcccccttctgcattccggtttctccatctcccctgtgaaaggagcagatccagtaattcctaatgttagtctacaacctgagttcaaaacatttctatgcctgttttctcttctacacgtgatgtcttacaccatggccaggtaggttccgtgctcagataacttcccagcctccccttcctcttacctccctccccatctccttatcttcccatctccttcaccaagcaacggacctgaccaacagatccagggttgattcagccccagtggcagaagggagcaatgccccacacactccaccccggctgactgccttacacaggccctcctcccagtgtcctcagcctcccttcctgtgcccttttgggctgtggggcccatgggtggaaagaacacagccatttgaggtggaggttatgcctaccacgcgtctgcctgcccttttgtctcttatcagctacacagttattagaaaaaaaaaattgaacagtaaactctgtcttcctcattagggaccaaactttcctgagccaagagtgttattaggtttctctgtaatcaccaagcatttgttgtgtgcccacttccaaagaggaccagagtgggctaaaccctgtgcaaaagacagaaggagcaaaaatgtttcctctcctcgcagagtaacagccagaaagtctctaaagcaaggctgagctacttggagtatgaatttggttcagactccactttctcatttcagttccccaccgattcaatgttttccaaaccgtctacagaataaacatatgtgtctggttttactctagtcagaagtcagaggtgcttttctcatttcttccttttttctcgatttacaaaaggaacatgcatttattggaggaaaaattaggaaagaaagataagcagcaaggggaaaaaaaaccttataaaacctcctaatcccagtagccagagatagctctgctaacaccgtgggggctatcctctccctggatttttaatgcatatgaattaggtgatatatgtgtacagtttttaaaacagtaattcaggctactgttgagttgaaaaataagtgtggttctggtgagtcaacaaaaagatctcagcgttttgatatcctttgatgtctagccctagagggcaggaccagtggtctatttggtctttttgcccctgtggtaccttgctcatggaagaggctcaaagttcattactaatttgagctgggcttggctcatggtctatttcatgtgttaagacagcaggtaaaggcgtatcttagtgtattagtccattttcacactgctgatgaaggcatacctgagactaggcaatttacaaaagaaagaaatttaatggactcacagttccacatggctggggaggcctcacaatcatggcagaaggtgaaagacacatctcacatggcggcagacaagagaagaaaacttgcgcagggaaactcccctttataaagccatcggatcttgtgagacttattcactatcacgagaatggcacaggaaaggcctgtccccatgattcaattatctcccactgggtccctcccacaacacatggggattatgggagctacaattcaagatgaggtttgggtggggacacagccaaatcgtatcacttggcatgaaacacagccctcccgagctacaggggacacaggatgcttatccccaagaagacaaaggataggagtcattcattgctctgtttatccatgcactcattccaagagcagttcctcagcccctcccctgggccagtgtggacaagcatgcatccagcagctctgagaccttctagctctagccacctgcagcctgctttgcttgtctctgggtagcagctgggaattcccaaacagaagcagcaaatgcatgataaggattaacatggccctgccctgaatttggggggtggaaggaaaggcctagagttggaatggggtagtctcagctgagctcagtgagcaaatgagggttcagaggtcaggctctctgaatctccggagtcacctgctctgctaagtcatcttttcctggcgagcttatgaaatcctgaaaagaggtgaaggtttgagtcctgaactccaatcctgaccctgttgcctactcactgtaggaccctggcgcaggtaatctttaccttcctgcacatgaatttcttcatttgtaaatcatgtctctcctactaggggagatggtgcgagaagttctcaggacagtgccttgcaggagaaaactccatcaacggagaccatcatcttatctcatttaacctgcaagtactgctgagtagtgggcattaaagttggacataaaatcacacgcacttgtgcaaaagacagaagtggcaagatgcttatttcctgctctcaaaaaataacagctagggagtctccaaagcaaggctgagccccttggaatatgaattcgattcagactgtacacccccacctcagaggttacaaagcactgtgagttccaaagcttttaggtaacttgccaaaaatcacgtagccaggaagtggcggattatctcaggtggttctgattctaaagtgtatgctcctaactaggctgacttattgcgccagtctcctggtctgtaccctctttagagagttataagaagcatgtaatgaggtgctgcccggaaaccttttgcctctgtgcctggcatcctggtaggccctctaaagatggtcgtcatcctaaacaggatgatgatgctgccctgcgtggagggatttgataaggagtattatgctagaagttgtcacaagttaatgaagagtctttgccttgaaagaacacaatgtagtgggaagggggcccctgctgcctctccttaggtacctaccctggtgatcctattaatggaagcatctagcacctagtttgtttctctattgccctaattataacttgcaattattttatttgcatattgtctcctcatgagaatgtcagctcattcgagcaaagagtcagcccttcttgtcacctgcactcaccatcattgtgacaataaggaaaacatctttggcctggcacagtggctcatgcctataatcctagcacttcaggaggccaaggcaggtggatcacctgaggtcaggagtttgagaccagcctggacaacatggtgataccctgtctccactaaaaatataaaaattagccaagcatggtggtacacacctgtaccaccatgtacaggtgtgtaccaccatgtacaagctacttgggaggctgaggcaggagaatcgcttgaacccgggaggcagaggtttcagtgagctgagattgtgccactgcactgcagcctgggcaacagagcgagactctgtctcaaaaaaaaaaaaaaatctctgttcagtgctagtatttgatacctttctaactctaacttgctaaactagttttgttgttttgttttttttacaaaaagagaagccctcaaacttagggcctttggcagaccacagtgccaaactaggatttcactttgttttttaatatatgtttgttttcattgtatttatttttactcttacctggggctagggattctagctttccatctggcaatgatagaaggtaatgacagaaagtatctctttaaaatacactgatttttcccccaagggcagtacatttaacaaaagctattaagtgataaataggagttggctgatctggcagattcatataaatacaagtgggcggatcttgaatgattgcaatgttaaagatactgaatgagatgtgcagccccatcgttaggagatgctgagaaaatatgatgcaggattggggaagagcatgtctcagggtgtctttggacagtgtcagcaaaggcaggtcccaggctggaccccacaatgtgacaagaggtagaggaatgccaggttaccatttccctgcaattcttcctggagtgacctggaggcttacacctccaacttggctgcctgtggggtgggaatactccctccctatgaagcctagaccagagagggcagaaggtcacccagatgcccagcagcttggagtcatacacagtctggggcagaagggacagcccctaatgggcagaaccccacatctcagtctttgaagagcccagagcagccagactctgacctctttttttttttttttttttgagacggagtctccctctgttgccaggctggagtgccatggtgcaatctcggctcactgcaacctctgccttccaggttcaggcaattctcctgcctcggcctcctgagtagctgggactacaggcgcacacaaccacgcctggctaatttttgtatttttagtagagacagggtttcaccatgttggccaggatggtctcgatctcttgaccttgtgaccccgcccaccttggcctcccaaagttctgggattacaggtgtgagccactgcgcccggccgcctctgacctcttgacttagcaaaatcagattcagttctggggagaagaactcagcaagacagagagtctacgcttcctttttccctccccacttctgagctttgcagcaatatcaaaggctgaaggaggggagggagggcctgcattaacaaaagctcagtgccctcgtgggcagctaggctctgtctttgcatattctgatgcctggcaggccactgtcatctttcttgtctggctaggatgtgagccttccccagccagccccttacttaatggaactctataactcttcatttcctggacacacgttgagttaagcaggtggcagacagctggcatttctcacttgctttctggcatgtcccatttttataggaagctaacctggcattttttattataaagccccagagtcccaaggtttaatatcttgagtgttagattcatgagcaacttggaagttagagattgccggaggctggaatttgatggagtgtgcgacctgtaacttggaatgtgatttatttactcaagggagggggaaagagcatgggacaattaactgggatttgagtttcaagaagtggggaatgcttaaaagggagtgagcagcagaggggttgtaaatccctctgacagctcgagtgttttttgaaataacagctgactttgaaaccaactgccttgggagctcaagccaggcagcgccagggactatttgcacccagctatctatgtcttttatttggaaggcaaacacctgtagagagtagccactgggagacactctttggattccagccagatggcctttgccgtgttactcaagcatgccacacgttgtcctacctcagggcctttgcactggctggtttccccagcttggagttctctccccagatttccacatgcctggcttttttcttcattcagctctcagaataaagattacctccccagagtggctttccctgggcaccctggctaaagatgcccccaactccatctactctctatccaataagtctctgcattctctttacagcacttgtatctctctgaagtctcatttatttgtttattgccttccttctccactagaccttcagcttgtaggattaaggactaggtctgtcgtgcatacagtatctcctgcacctagaacactgtgccaggaccattctggcatccatgtagtggattttgaacttaagagatgacctctgggcctccataaaaggagagtgggcttgagcggtggttctcaaagtggggttccctggacccccagcatcagcattttctggaaacttgttagaaatgcaaatcagaaactctatttgcaggttaaaggtggttggggtagtgccagccacctttgttttaacaaagcttcccaggagattctagtgcctgctcaggtttgttaaccactggcctagtgtttaaacacctatggggtctaggtaggtgtgtaaatgcaggaagtagaccaggtgtggtacactacagagtggtgaggactgtggcaaaggagaccgcaggtgcagacccccatagaagctgttatgttttattggttgtcactccatgatggggatctcactccctggaatactggaagggaaggtctggccatgggaagcagcctaaggcactgcatccattcattcattcgtgtgttcagcacctgtaacattaaccagataaacccagtccctgcccgtattagtccattttcacgctgctgacaaagacctaccggagactgggaagaaaaagaggtttaattggacttacagttccctatggctggggaggcctcagaatcatggcaggaggtgacagacacttctcacatggcagcagcaagagaaaatgaggaagaagcaaaagcagaaacccctgataaacccattagatctcgtgagacttattccctatcacgagaatagcacaggaaagactcacccccatgattcaattacctccccctgggcccctcccacaacacatgggaattctgagagatacaattcaagttaagatttgggtagggacacagccaaaccatgtaactgtcctcttaaggcttacagtctggagggggagacagttcgtcatcataggctccaggcaacacctgttcaattacaacctcagcaggtgttgcaaaggtggagtccacagtgcttcagggacctattggggggagtgacctagttggagaggccatgggaggcttttgaggcaagtgggaaaagcattgcaggccaaggaaatggcagaggcaaaggctcggagatgggctggtgtgattggaactccgtgaatgacagggagagtcatatgagaagagggaaaatggtgtgtgtgagccagactatatgggacctccaggcactgggagactctctatccagagagtgctggggagtcattgtagcagtggagtgacctgatcaattgtgcattttgaagcaatcgctcatagtactggacgaagaatgaactggggaagccagagagacagtgaggaacagttgtcgtcattcaggaagaagaatattattagcaataatattcatggtaatattattagtgataatatgagcagctggtgaaggagtaaacgctttagctggacactggatgaagcgcttgtgtgctttcatctcaacctcccatctgctcacgaggcagcacttactgccccactgtcttagtggcttgaaacaacaaacaacaagaacatggttctgaaagtcagaagtccaaagtgggtctcatggagctaaaatcaggatgttggcagggctgtgctccttctagagattctaggggagaatccattttcttgcctttttccagctttttagaggctgcctgcattccttggctcgtgcccccttctccatcttcaaagtcagcgatggtgggttgagtccttctcccccatcacaaccattcagccccctcttctatcacatctccttctgcctctctcttttgtctccccctttgcttttgaagaccctgcgattacatccatctggcccgcctggctaatccaggataatctgtctatctcaagagtatgactcaatcacatctgcaaagtctcctttgccatgtagggtaaattttcaccagttccagggattaggatgtggacatctttggagccattattcagttcaccacactcctggttatagaggcagagcctgtgcccccatgagatgcagtgtgccccaaggtcgtgggggcttcaggtgacagagctgggctgggagccagggtgtcagtcctcagaggtggctgctcccagaaaaagcccctgctccccacctgggcttggtgctgaagcgtttggaggagggaaaggacatggctgccacaggcattcagacttctgtcccagccactgttttggcagaatgagccagtctggacagaggccctcagagacaaaccttctagatgattttatctcattgtttctgacaagccccttttaggttggtttataataaacatcttgtacccacagtgccatcttagccaaaggctctctgtgtcacctgagatagggactcaaagggcagccttgagggtactgcctgaggccaggctgggagaggtggggtagcctgcagataagatggagaattcccaggccttgcccctcttcttggagaaagatgatttttggtgtacagaaataccgagaggtgcatgtgtgcatgtgcactagaagctagagagatactaaatacactattgagccactaaaacactttctgctgacctccagatggactgtactaccagcagacctcgttaatcttcattgccgtaggcgatggggatagtgacattacagctaccactttctgagggcttatgacatgccagagactcagagaaagttgttaagaagcaaaagatggattttaagaacatagcctccagatccaggtggcctgcattcaaaccccagttcctgcaattccacgattgggtatttatccagaggaacggaaatcagcatgtcgaagagagatctgtgctcccccggttcattgtagcactcttcacaatagccaagatatggaatcaactcgaatccatcaacagatgaatggatcaagaaaatgtggcatataaatgcggcggagtattattcagccttaaaaaaagaaggaaatcctatcgtgtgtgacaacatgaatgaacctagaggacattatgctaagtgaaaaaaggcaggcataaaaagacaaataccagccaggggcagtggctcaggcctgtaatcccagcactttgggaggccgagatgggggcatcacctgaggtcaggagttcaagaccagcctggccaacatggtgaaaccccatctctactaaaaatataaaaattagccaggcgtggtggtaggcacctgtaatcccagctactcaggaggctgagacaagagaattacttgaacccgggaggcagaggttgcagtgagctgagatggcgccactgcactccagcctgggtgacacagtgagactccatctcaaaataaatatattaattaaaagacaaataccacatgatctcacttatatgtggaatctaaaaaagtcagtcatagaaattgagtagaatggtggttaccagaggctggggagtatggggagtggagagactttgatcaaaggccacagaacttcatttagacaggaggaataagttcaagagatctattgaacatcatggtgattataatcaataacaataggttatatacttgaaaattgctgagggagtagattttaagtgttctcaccgcacacaaaaaaatgtgagataaatacaatagcttgatttagccattccatatgtatacatatatcaaaacatcatgtgctacacaataaatatgtacaatttttacacgttaaattcatccccgctctacttaacccctgagcctcaattttgtcatctataaaatgagattgataccatgcttcattaaatcattgaagataccttcaattagaatattcaccatttaggctgggtgcagcggctcatgtctgtaatcccagcactttgggagactgagacaggaggatcactttagcccaggagtttgagaccagcccggacaacatagtgagaccccatctcaaagaaaagaatattcaccatttattttatgggctacaaagaaagaaatgtagtgccaatgaaactatgatctgtcaatgattgcaggacacattctgattttagagatgtgcatctttggaatcaacgagatacagcaagaatacccactttgtaagactcttatccttaggctagtgtctggcacatagaatgtgcccagaacatgtcagcctgtattgtttctgctgtgcccattttacagacatagaaactgaggttgaagtcatttctgaaggtcacccagcaagtagtgaatgctggagtcgggatttggactcagtttgtgctcctctgttcccttagctgtgatatctaattaatggctcaagaatcatgtctgataactgggcacccacacagtggaggagaagataggaagaagatcgggaatgggttcccatcaaggctatgcatccacgagctggtcctctaggtgtccatatcctcacccataaaatagatataatagggtttgctattatatatataggggttgcagcattgctagaaggaatcatggaggtgatataggtcctaagcacatactcagtaaactttcatcctcttctcccttcctttccccacatcccacactgcgagtggcttttaggccaccattattagtcatgaggaattccaagctcagagcagttgctgtggacacttggactgacttgccggggccgccctagcctcagtcatcctggacatctgcctgaggcctgctcatctttaaagctcagctttcatcttgaacttgtctccagctttgttcctgataaacatccaggtgggcacagccaggcctggagccccaaattcctctgtagacattgcccatctgcaaatactcttcactgggtaaagactttagaaaaggataccttgggtatcagtgccgctttacattttttacagatttcaacgccatacattaattatattaattgttaattctttccctgcttactttttttttttttttttttgagacagggtctcactctgtgtcacccaggctggattgtggtggtgtaatctccatgcactgcagcctctgcctcctggactcaagagatcctccctcctcagcctcccaaatagctgggactacaggcatgtgccactacacacagctagtttttttgtgtatcctttgtagaattggggtcttgccatgttgcccaggctctgactttttaaaacattttttggaaggataacgtaccttcaaaattatccagatcataaaagaacagcccaatgagtttccactaagtatgtatccatgtaaccagcgcccaaatcaaaacacagaacactgccttcccccagccccctaataatgctccttccagcacccccgcccaccacacacacacacacacaagggccatcactgtgccgactttcagcatgtaggtcagtttcatttgcttatgcactttatataaatggagtagtcttgggtgtcaggcttccttcactcaacattatgttggtgagctttatccatgctttttgcagttagcagtagcttggttatttttatatagtacagcatgaacatattttgttataagtatatatcatattttatccacttttctgttgacgaacatttgggttgcgtcttagtttggactaccgtgacacggtactgcagactgagtggcttagaaacaacagaaattgagcctgtagtcccagctacttgggaggctgaggcaggagaatcacttgaacccaggagtcagaggttgcagtgagccaacattgcgccactgcactccagcctggatgacagagcgagactctatctcaaaaaaaaaaaaaaagaaaaaagaaatttatttctcacagttccaaaggctgaaaagtcaaagatccagtgctagcatgggcagattctggggagggccgtcttccagacttttgacttctccttatatcctcatatggcaaggaaacagcaagagaactagctggagtcccttttaaaggagcactaatcccattcatgaggctccgctctcatgacttaattatcttccaaagcctcacctcctaataccatcacgttgggattaggatttcaacatacggaattggggacacaaacattcaatccattgcaggttggttctagtttgggatttcaacagataggttgctttaacattctagtgcatgtgtaggggtgaatatgagaattcatatctgttgggtacttacttagaggaagaatcgctggttgtggatttgtattagtccgttttcacgctgctaataaagacctaccggagactgggtaatttataaaggaaagaggttttatggactcacagttccacatggctggagaggcctcacaattatgatgggaggcaaaggggaaacaaaggcacgtcttacatggtggcaagcaagagcgcttgtgcaggggaactcccctttataaaaccatcagatctcatgagacttattcaataccaggagaacagtatgggggaaactgcccccataattcaattatctccacctggccctgatcttgacacttggggattattacaattcaaggtgagatttgggtggggacacagccaaaccatatcagggttatttgtatgtatatttcactttagtagctgtgccaaactggtgcggtagtttctccagaagctcttgaggtcatacgggagtgagagaagcaaagacttcagcagctgctgaagggaaagaggttgtaaggagggaaagaagacaaggcgtggaaatctgaagcttgagactttcctgcagttaccctgagcaggagagtccagggagtcttggagcctgttggcggtgatttgctctgcggtctgcagtggggagggtattttctgggatctggcctgtgatgagtgtaggtggctgttcaggaactaagtacccaggggagggactctgcccacagtctcaaatattgaaatgtcaacatggagtaattggctgctctgcccacccttcctccacctctgctccagcagccacagcaaatgccctgcctgggacagcaacctgggggatgcagggtcagccctgactcattctgggctgcctcctgccaactggctgggtgacctcctcggacatgtgaatcagactttctgtgagtcagctacccggggactgtcgccttaagcagatgaagaaaaaaatgttagtcaaagatcatgggtggctatcagtggcattttagattagtatacggatgggtggacagataaacagttgtgatatgtgtatagatatatcacttatatatatttgtacaagtgtatgtgtgtctgtttactattttattaatcacttaacaactttttataatagccagtgatctcatggaaagttaccatgaaatgtactaggcatagagaggtgcctacacctttacatgcctgatttcatgtggttctcctgacaacccagaaaggcagcagctgttggccccattttgcagataataaaactgaagctcagagaggttaatgcacccacccaaggtcacacagccactaaatgacagatcaggattctaacccgttagtcctactctaagcccccatgctcctaaccactgtgctatacttcccactggatgccaaggcctgtttccaactcttttatctcattcaatcctcgtattcaactacagggttaagtattattagtttcctttgatcgatgaggaaactgaggcccagagaggtgaggtaacccacctcaagacatacagtaagtaaggagcagagctgggattctgagatccctctgatgccagcgctcttgcttcaaccacaggaaatacaatctcagcaaagcccagtacacaacaagggctcagtaaacaccaaatgaatgaacacaatgccaggagtattttagcaataacatcacaggttaaaagaggaaaattcaaactgtgattttgatgtagatggaaaattaattttcacagtgacgttctttcttcttttggcccacattggatactctgagccagtcacggtgctaggggctgggagtgctatgatgaatctagaattcattcattcagtgacagcttgtgggtgcctgctctgtgcgtgctgggaattgtgctcactgcggaggaacaggacagatgagcatacaggcaactaaatgagaaggtgttactttcagtgcataatgtcctttttcatcctgtcattcatcttaaactactggtcctcgaaatgaactcaatgaggctgaacatagtttgaaaaactctttatctagacaggcgtctggtttgggggtggtattactggtgtttacacatccctgtccaaacaattgactgcatcgtttgctgatgatacttaatacacatcagccaccactctgctggtctttcatcactgtcctcacacactgactcctggtaagtgcatgcagctggtgtgaatggccaacagaatgctgtctgagtggcgtctgaggacccagaagtttttgatttatgtgctgctttccacctgtgagcctctgggatggattggacatggcaaacccatttctggactaggctagattctgtgggtgtccttgtcggtcagccacattggccaagtttctaaagaatctgcaagaacttcctcccagatctccatcccagaaccagatctgaagtccagtcccagacttattatctcataagcacaatagtggcatgtccacgtgtctatgccatcatttgtcacttgtagtaactgttgtgggtcaccttcttctgaacgactgccattaatttatcttgtccttttgcttttcagcctctgtaagggacggacgctctattccgttgtgagggatgccaaaatcgttttggatgtcaacaaaaccaggcagattgctcaagaaattgtgaaggtactgtcggctcttgggcctcctatctaaatctcagaaagacccagtttcccccagggaagcccccctaccccagggctcctaagattcatggttggatttcagactaccaatctggacttaaaagaaattagacttgacctgaaaaatgccaggccatgtataagtaagaattctgcctcgatacgatctttaggaactatccaccaatgtttggtttccatctggtgtctcatcactatggtacttggacctatgcaaggaccaggggtcacatacaagctattcagccctcttggttaggatccaccatccttcgagtccttgaatttccatgagtggaaaccatctctctccactgctgctagggaaacatcaaattgttgggtgttgttttggattaaaacaaacaagaacattctgtgttttctggcaggggccttattagtcagttgtactcaagcttttatttctcatttggaggtgttaggactgagctgcatgaggaaataaaagatgtgactgctcacaaaggcaataaaaaagaaaccaccacaactctagatgtttgcccttgaacgaggcctccaatagactcttctgtgtgttcttaatgagcagttgtgaacatctctttaggaactcattgccttctgcggcagcataggttaagtagatctgactatctagtcttgcggaagagttagtatttaaaggggaagtggatgaaaatggttggttgaattcctttccctggggatctttttgtttcttcttcaggaatcagatgagcaaatggggctggcctttctgtggtctaagagtggcagtggatttgtgtcttgggggccctgcctgttcccgcttgccatgccttccccgacctcacccccaggacccacggtcagaccccaggccctgcctctgttgagtgtggtcccattagggagccaagtcttcaggacaaggaatgtgaactcaagccagggtggcagcaagctcttaggtttttctctggcaactctctgttccttgcttcttgcagggcatgggctacctccacgccaagggaatcctacacaaggacctcaagtcaaagaacgtcttctatgacaacggcaaagtggtcatcacggactttggactcttcagcatttctggggtgctgcaggctggcaggtgagaggcagtgggaagacccggagagtttcctgacagatgatggtcaggaggtgggaagttagtccaaatggctttagtgacctagactcagggttggtcctgaggttgctgagctgagtggggcagctgctctactgatgtgggatgccaaggccctgctctgtttccccctgggggggccagcaccttgctcacctgtcttgtctttgagtgtgtgtgattggacacagagcacccccagacctttcaaagcccctaccctttaatttaactggaggactctcctctaaccctaagtaattcacttggaagttgagatcacccaagaggccttgctcaaagttttcttaggaattaagtgattttagtacaggaagagtacagttaacagcaagagatttaaagtcagaggcacccatggcctgacacagctcttccacttattaaatgcgactttaatcaagccgaacaacgtctctgaactttagtttccttgtctgcaagaaaagtggtaggtttgttgatgccttcctctgtcagttctcgtgaggataaaatgagaacacgcatcaagcatccacccagtgcccaatgcacctcaaaagctccgcaaagggtagctgctgctgagttgtagcaattagtattaatttgcatatacctcccagtatcacccaggagaatcattaaccatcattaagtaattaactctcagccactactcaccctagagcaagccgcattgagttggccacatgagaaacagcttgatctcaaataaacaacccataattcagaaagtctacccttgtgacttttaatttggactgcactctctctccttctctctctcttgctgtctctctctcgctctctctctctctctcattttaaacctctgcatgttttttataatcctgcattttataacgaatggtgcatctttccagaaagccccacagtttctctcattttacttcagtttcagctgcttttgagaaccactgatttttttttattttatttatttatttttttatttttttgaggaatgccccaggaacccggacaaagtgaatcttgtttgtgttatatgacaccttgaatctgttataagttggaccatttggagtttgacaaaacttcatgtagctgtttctgtgtgatgaggaccaaacaggcgcttgtttctttttcagattttgctccacccaagaaagattaaccatagtctacaaaattatttgtagtccctaagataaggcagtaagtaggcagtaaatatataaatatattaatagatacttgaagagagtccctccagttggaacccaagaagcccgggagggcaagactgtgtagaatcccttcttccctctgactccccagcagcagttaagttcctggttcactggcagggaactcatacccttcccagtttcccagtgtcccaagggaactgcaaggacgcaatgttgggtgacttcactgtcaacccaagtatttgcatcaagacaaaaggaggcccagtaagagttttctctaacttgcttctgggctgttttataaaaagcagaaattcttccctcctggtggcatgtccatacctctctctttctcctcaacagtggcttgtccctgaggtggaggaaaggggtgcaggacctctgattttcttcctttagactcagttttctgaagccacaaggagaagaggaagaaaaagaaatggaatgccttgggcatcccttcctttagctcattcatggagacccattgtcaaccaggaagttagttcaaccaagtcaagggcaaggtggcttctggtctccttgtccagagagcagcccctcccacccctgccccagccaggttgtcaacacaaacccagggagtgccttcagcaacatctcccaacaagaaattcacatttcctggccacccacaagtagccatcaatgacttcttgtgcttttatcctttattctgcaatgaaccatctcaaaacttagtggcttaaaacaaggtattgtcatccctcatagttctgtgggttgactgggctcagctgagctcttgtgctcggtttgtcctgtaggtgcaatcagatggcggggagggggtgaagttggagacatctgaaggcttccacattcacacagctgggctgggctggctgaaacatctggggggctgatggggtctctctcatctccctgcttttccctcttcatgcagcctctctgcttgactacattgggcttcctcacaccatggcagtctcagggtagtcaaacttcttatgtagcaactgggctccaccaaagcaagtgcgttgcaaactatgacagggaggtggaactctggggtgtcccatgaatcccaggacctttcccaggttgtagatttacctcaatatttatgaataccaccagtgtagctctagggatccacagggtcccctcaggggttcaggtccatttactccctcttgttcatgacaaggcatcttcagtaactgcccccattgcagcctggagcccctagtgcagccgccagaggccaggagacaccccttgaataaggggcatctatggccctgatcagcaacctgggggctggattataggagtggagagagaagggagctggccaggctttgggctttgcaggaagcagggccagtatctctcaggagataggcctggaagttccctcattcattactcactcagccagtcagcaaataattagggagtgcatgtattagtcagcttgggctgctataacacaataccagactcaggggtttaaacaacagacatttattttcttacagttctggaggctgaaagtccaaaatcaaggtgctggcaaatttagtgtctagtgagggctctcttcccagcttgtagatggccaccttcttactgtgtcctcatatggcctcttctctgtgcaccgaaagagagagagagaggtctctgatgtctctcctcttcttataagaacaccaatcttattggattagggcctcgaacttacaatctcatttaaccttaatcacctccctataggctttatcactaaatacaatcaaattgggggttaggggttcaacatactaaatttgggggaggcaaaattcagtctataataccttgagatagattccagaaacttgtgtttaacacacacctggttccctgatccttagtttcctcacctgtaaaatgggagtaggggcaggcactaatagcacctatctcataaggctgttttgatgattaaatgggatagagatgtggaaggatattttagcattttgctctttttttttctttttttcgagacaggatctcttgctctgtcacccaggctggaatgcagtagtgcaatcacggctcactgcagcttcaacctccgaggctcaagcgatcctcctacctcagcctttcaaggtcccaggcttacaggcatgcaccaccatgcccagctgggctttactctttaatggttctctccagaaattcttgtagaattgggttgaggtgcctagtccctggggttttaaagacttgtgtgcaaacagatctcagctctgtccatttggacaggtcacctaaatgttttgagcctccgtttccttatcctcataagccctcagattgtgggcttatgaggtctaagtgggatggacaatctggcaaacagtaggcactcagcaggagtcacttgccttcctgccctcccctcagttagagcttggggtatggatagcccttggtgcccagcagggagagacccccccgccaccaagcccgaggcagggatggggcagcccagtgatgtgagtgtgttctgcacatccagacagaccccagcatccagctgttctgccgtcgtcaagaaaaggtatcgttttagatgccagtgctgtcatgccagcctcccaaagcctgttattaatcataataaccataatgaagatgatttgggtttgtcatcggtgggcccatcgccatgggaacggggcaccccagggtgttagtgccaggcctgtctcccagccccctaccacacccgtgccaggcgtggtcaccactctacctcctgccctggccccaaaatgccagctgctgaccccatgagtcaggaagaggtggcaggggtgtttgcaaaaagatgggagcagagaagcttccctttggcaggggcaccccaacccaccccacccccagtggcccagtcattgcaggagaatgttggctggcctatgccaaagactttcatggaagacattcctactgtgggctctagtctcaactccacttctgagtcctcgagataaacacacacacacacacacacacacacacacacacacacacatgtgtaatgattatgtccagtaattgcgtgtctctggcagctgacacagtcctgtgccacgcactgtctcattttaatccttgcaacagctctgtgaagtacaaattaatgtgcccattttatagatgggaaaatagaaatttgggtctgctcaaggttccatagctagtaagtaagagccttcaacctctgtgggtgttcctgattctagaagcaagagctgatttaactctgctgactcaagtgtttgctagttagtttgagtagtagtttctagcacaggatgtgtgtatcatgtcttttgtgtagaatgcaggagcaagtcatgtgctattaatcctgaaacactgagatttggaccatttccgtattttgtataaattagaacagtgattctcaaccagggccatttttcccctccaggggacatttgatgatgtctgaagacatttttagttgtcatgattagggggaggggggtgctaacggcctgtaatgagtagaggccagggatgctgctgaccatcctgcaatgcccaggacagcccccgtgtcccccaacaacaaagaactgcccagacccaaatgtcaatagtgccaaggttgagaaatcctaaattagaacaaatttaatggtgtctgcctggccacattgctttctgttgcatgcatgccagtctgctcctagcctgggagtgcaggaggtggatgggtggcccagggtgggatacctgtggtaagccaccatccaaatgcaattaagagttgtgattgccgcagttacccggctttgcttcctttcctacagtccctgttttgggttctacaaaaagtcgagtatatccaaatggatgctaccttcatgtgtgagatggaggggttatgaaagagatcttaaagaatcgcatgtatgggatacatccagccttacccagctagtgaatgtcactgcagcactggaaccctgagccccaaactcttggagcgtcattcagggatctttcctccacccagtgtttctacaggtgtgatctgcaagttgatgtgggggaggacatgaacaaacattttctatcttaattttaatgtgtattagaaaatcactagtctccatttatggccacactacagagtgacctattgaaatatatttaagttaaaaatgcatttcttaatatataatagtctagaacagtgttgtccaatttggtggccactagccagatgtggctatgtaaatttaactttaattaaaatgaaaagttcagggctaggagcagtggctcatgcctataatctcaatactttgggaggctgaggttggaggatcaatcccttgaggccaggagtttcagaccagcctgggcaacatagcaagatcacatagcaagaccacatctctaaaaaaaaataaaataaaattagcagggtgcggttgctcacgcctgtaatcccagctacttcataggctgaagatgggagggtcgcttgaggccaggagttcaagcgaccatgaactatgatctcacctctgcacttcagcctgggtgatagacagactgtctcagcagaccttgtctctaaaattaaaaaaaaaaaaaatgaaaagtttagttcttcagttgtaagccacatttcaagtgctcaatagtcatggtggttagtggctgccacattggaccatatagaggatatttctggcataatggaaagttctatcgcataatgctgctcttgaaggtatttagatatggcaaaaatcatgattatgggatatgaatgagtgcgtttgagggagcagcatgtcacaacttctacatctcagaaaccctctctggaagaatctagctagccccaggtccccacagagaccttcatgctggaggctgtcatcctgaatgacctcacttttgaggatgattcgagatatgcaccccctctcccgctgactgctcccttcccctgtgttaatgagccagttcctaggagtcttgagtcagtgaagatctcagagggggtctgcttagatttcagacccacatggaaagctctgtcttgctaatgacttccagtgaaagaagggagccagcctccttccacatctaagaatttacctaaggaataaattaacatggatgaagggagatattccctgtatctacccaaagatgttcatggcagcattgttcataatggcggaagagggaaccacccgcccaaggcccaacagcaaggagttggttgtatatactttgatacataggatgggatgatgtgttccaattacactggtgttctttagggttctagaacaccctgaatggggcccttgttggaactttgtcctaacttccccttctgtctagatattctccttgttcacataactggatcctttatgtcacgtagatcttagctcacagtttacctgcagtaagatccatcttatctttgatgcatcctctattttaattatttgtacgatgcttatcacaatctttagcttttcctgtttattgaactcatttgttgtcttctttccctactaaagtgcaagctccaggagggaagggaccttgttggtcttgttctgtgccaagcacagaacctaggcatcataggtgatggaaaaacacagtagattatcattatttgtggattcactgaaatgtatttgtaatcccccaaatcaacactcacagcactttcacagttattcagggacatgcagagtggggaaaagtttgagttacccaatgcacatgtttccagcttaggtcaaacaggaggatgttctgcctcattgtttcagcctcatgcagagaagccttgaggatggaggttgagacagagtgggcagtgcagagtagcataagaagctctagctctggggccagttggatgagatttgaatcccaactctggcacctgttcgtagggctgcctcagacaagtcacttaacacttctgagccccatagtctattatgtaaaataaaacagaatctgtcagataagttgtttttagggttaaaattataaactatgtgagggggtgtgtgcatgtgtacatatttccccaggagcaatgattcagtattctgctaattccgtgttccagtgactttatagaacgtaactgccgtgaataacaagaatccacactgtcattgaatgaagatgggcaagaaggtgggtgcctcagaggcaatggaatttgatgatggtttggatcctgagtgtttctctagagcagccttccctgcacctactactgggtctcggcctccagtaggtggtcaggcagtgctcaatgtgggaagcgagaagggcagcagagatggctccagggacgtagggtcagtgccagggggactggtccaccctgggctatgaaacagagctcatcctgtgctttgcttctccaggcgggaggacaaactgcgcatccagaatggctggctatgccacctggcaccagagatcatccgccagctgtcccccgacacagaggaggataagctccccttctccaagcactctgacgtctttgcccttgggtaagtgggccctgccctggccattgagagccacagcctgggcagaggggcacttctcaagtctttcagtgcttttggaagggccagggtgtacctgtctacagggccaaagtggctggatttttgggtgagaatggaggaacctgagtagggtatactagaaagaatgaccctaacaaacgtgtgtgtctggtttctaatggattatgtggccttaacaagttacccaactcatttacttattcaatagctatttgttggctgcctactatgtgctaggattgtagcagatgcaggggatacaagattcagtgttgtcttcattattactacataacaaattaccccaaaacttagccactgaaaacatttcttatctcaagtttctgtggtcaggaatttgagagtggcttagctgagtggttctgagtgggcttttatgaggttgcagtcaagatattggctagggctgcggtctcatctgaaggctcagcaggctggggatccacttccctggtggcccactcacacagctgttggaaggaggcctcagttcctcaacccttgggcctgagtataggttacttgaatgacttcacaacatggtggctacaagcctcattgtcatttatgatctagtctcagaaatttacatatcattgctcctaccatatgctgtttgttaaaagcaagttgctaaatccagtccacacctaaggggaggagaattaagctctatcttatacataatggaatatcaaagaatatactggacatatttaaaaccaccagaggcccctactctctctttctagtggaaggcagataaggaaacatccaactttagcaaagtatgataaatgctattctgagaataaacacaggactgtgggaataaaagaggaaccaaatccaatctgggagatcagggagggcttccaggagatgataatcctgagcctaagttaaagattgagtacaagggcagggtgaggtgttccagatcaaaagactgtgcaaaaagtttcaaaaagaaaagagaacacattgcccacatggaataatatatagaagggttgggggaggaaagggagctgatggatgaagagtcaggaaaaaaattaggctgggggtggtgagataagagactagagagggaagcacggtcaatcctgcaaggacttaaaggttgagttaaggagttttcatttcatcttcagtgcactaaggagccattgatggttattaaactctgggggaagggggagtgacataatcctaatttgagttttagatcaatcagatcactctggctgctgagtagagaatggaatgaagaaggagaggatgggggccgggtgtccaatacacagggaaatgctggcagccttcactgaatcagagcctgtgggtatgaaagctgagaatggacatcagcagcacccagaggaggtggaagcaatagagcttgatgatggattgaatttgggtggtgcctagatagctgccttaagcaagcaggtggagagtggcatcattcactaaggtggagaccatggcggtgcagcagggttggggcatgccagggaggaaaagaggtcaggtttagacacagtgagtttgagctatcgtggagatgacaaatgaaaccaccaaaacacagctgcctctacacgactagtatagaaaagagcagtttaggacttgtcagaaaataggtaactgcagccacagacagaatgagatgtctttggaagtacagaaggagaagaagggcctaggacacagcgccaggatgcagggaagagtgccctgagaaaatatagccagaaaggcttctaggctcccatggccatgcaaatccttgcctaaccttgtccacatgtggttgcaagggctgggggagataacactggggaagcggtttgggaaagttgcaggcctgcagatgagtgcaattagacttagcaccaccgagagatgttacagagacagtcttccttggaaaagggcccccaccgcatcctcactgaaaaaccctgaggagatatttctggaagatcagaattctcaacatctgttgcttgggcccctttagaggatgtcagttggcctgattattttatgcccaaatctttatctagttagatattgttatctgaaaccaaattgcaataattaagttggtatagtttagtgtaaatttagcaaaagaaaaaaaaatgtgattaacaaaatgtaccagaataattggttttctgctggagttttcatcttcagcaaatcttttttccttaaagtgagtttctcttgaaagttgggtttaaaaggaagttttaatgaggcttttatttctgacactgctgaattccgaaggacccggctctctggtttcctgccaattaggtgcatcctgttgcttgggaacctcgtgctcagaaatgacttagaacaaaaatgaactttttaaagaggattgagcactgtgttaagccttttatgtgcattgtctcacaatttttacaagcacccttggaagcagataccatgttgctcccaattgacaggtgagaatactgaggcttcagatggctcagtgacatgccttacagtgatgaatgatggtgctgagattcacctggaatatcctgtactctagagttggagcttttaaccatagagtcccaatgggtttgggatttattttgccactcaaagccctatttctctcaactgtaaatcaaggataataaatccattgaggtgttctaagaattgagtgagaaaacatttgtaaggtacccagcacagggaataactcaaaacacccttccccgtttcacatgagtggtggatgagtctgtttatgcctccttcaccagactccaatcgccagccacaagctcgcacctcccaaattgtgcactttcttgattacaaaggactcttaaataggatggagtctaagcttcctaggatagcacgttggccagtggcaccatcttggagttagatggactaagttcagcttctggctgcccttcttgtttgctgtgttatcttgggaaagacacacaacctttctgggcatcagtttcctcatctatgaaaggcggataatattaataataatgcctcctgttttaaaatgtaggttttgttattattcaggcagcatgaggccaacagtcgcctttgaaaagatggttactcacagttcccagagggggcgtgccacaccatgcagtgtccacagggggcagcaccagggtcggtctggaggcagaggaaatgtgaggaaaacgttgggaagagcctttattgtggctcttgggaaggagcaggggaggcagggtaagaagacttaggattggcttgtttgaatgatttcagcaggctctggtgtataggggctggggaatattggcctggaacttgaaagcccaattaaggaggtagttggcagtatgagtgtgagttctggattatctgattagcctgtgaaagctgtgctcacaggtgagtgctttactatttccaggaattggctgttcctggaaggggcagaccctccagggtcagcagagccccaagtagtcaaagcatcagaataaaaagacatgatgaatagacctccctccacaaaaaaacttagaatagtgcctagtgcagagtaaaacctcaataagcattattatttcttatgataactataatcttttagcaccttctcttgagagctttctgatcatctaacttgacatccgaacacctgagcatcaccaccccttccccagcccagaggtataaggttgtcaggtagaaggaagatgtaactacgaagtgaaaccctagcaatagttgatttgacacagtgctctgattagtaaaaaggatagcagagtgctttgtgttctttaaagcaaacttacatgaaatcttagagtggaggaaagatcactttctaggattgtttcagatatttcctaagttggggaatcttgtgctcaaagcgctgagatctgtccccatgatacagctcagtgacaccctagcatcctgtttcatccactgtggtcctcactgctattcacacttcacagcatcatttatgcaccacctggcccatcacccccttcatggcacatgctactcactagagcaatcctctctccattaattacaatgtcatgacttatgaaacagaaaataatgtggtaaatccctctagaataatcctagcatggagttgttttggcattcggagtcccagataaacatccttccactgcaatgttgtcattattctcatttatcaggtaagaaaacctgcatttggagaagtgaagtgacgtacccaggaaacctaccctattatactactagtataaatagaatcaggacttgaacccaagtcgctgtcaaacctctttttttctttccaccgttccgcagggtggtttatacttagaaaaaaaaaaggacaagtataaaagaaaaaaaatcctaacctgtcacccagagttagttattgttaacattttgctatgctttactttattctcttgttcatacatatataatggttttttaaaaagcaatatcaaatcctacatacagtctcatatcctgcttttttttacctaaggttatatattgagcattttttatgtcagcaaaatttatttgaaatgttttaataataatacagcatttcattttattttatggatttaccataatgcatataaccaattcctcttattggacaattgtgttatttttactttttttcaatattatatatagtgctttagagaatatccttataaataaatttttgtatccctcatttatttgcaatgatttcctagaatcattgcaagtagaatcagggacagagatcctaaccacattatatttaactattcattagaagatatcctgggataaacatgacttctaagacattaagaaagctttaggtatgtcgcacatggcaaaataccaaccccatgaggaagaaagtggggagaagaatgggtgccaggagactggctgggtgggtgtgtgctaataatggaggtacaaggttgcaagtgacacaccacaccaacacccctttaacaacgtctgccaacagcacaatctggtatgaactccacgccagggaatggcctttcaagacccaaccagcagaggcaataatctggcaaatgggcacaggcatgaaacccaacctcagccagattggcatgggaaaagaaatctcggtaagtcccaagataggtccagacttgggggatgaggggagacacagacacagtcatgggccttctttttactatgtgttaaggttacaaatgctttcccatagggtgaccaaaaaaatatgcattccaaccttgtcagatggcagtttgaagcttaaaaggcaaggctgctgcactgtgcctgcaatttcaggtacctgccaccaggggcacagtaacacgtggtcaggtttttcctaactgtgggttgctgagttaggtagaaccaatatatctctctttttctggtatttttaaaagatatgaattaaaacatcacaaatattaatggttccaattttatttgcatctacataataattttaaggcattatctaactcagaacaagacatacagaaacagagaagcctgggtatacattaatattaacaatcttcctctgaaacacagcaggaagaatcctctcttttgatcagaagacacataagtcagagaaggagtaatgatgtggtatgtttctaaagattacctgcacctaggtgatgaagagattactaaaagtaacttttctcctctgactttgaagggctcttatagtattgagatatggatggagaccccaggattcccttttatcccttctcttgagagaaatgtcaagaaactgtttgggaagtattgttgacctcagtgtattctagaccttctagaatagagcttacctggttgttatttgggctcagaaagtacatgggaagaaggatggatggatggtaaacggatggatggatggatggatggataatgaaggatgaagaattaatgagataattgacatagatgggtggatgtatagatgcatgcatgatgggtggatgagtggatgatatatgggtggatggatggatgaaggatggaagagtgaattgatatggatgggtagatgtgtagatacatgccggatggatggatggatggatggatggatggatggataatgaaagatgaagaatgaatgagtgaattgacatagatgggtggatatatagatgcatgcatgatgggtggatgagtggatgaatggatggatggatcatatatgggtggatggatggatgaaggatggaagagtgaattgactggatgggtagatgtgtagatacatactggatggatggatggatggatgaaggatggaagagtgaattgattggatgggtagatgtgtagacacgtaccggatgggtggatggatggatggatggatgaatggatgatggaggaatatggaaatggggcagatgagtggacaaattggcagaccaaatgtgatgccaaagagtaatcaagaaatcaccatttatgtgtaatcaccacacattggtttcatttaggacattcttctcttctgctgggcctttgaacaagaagagagacctaccttcaccaagctcatggacatgctggagaaactgccaaagcgaaaccgtcgcctgtctcaccctggacatttctggaagtctgcagagtaggttttctcccttaatgtctctccccactgccttgtcctctgccctttgtcacctttttgatcccctctgcatcttttttactcctcccccaacaagctcctatccatgtgcccacccttcggcaaccactcttccctactaggtttctgttcaatggagtctgttttggggtttgggtgctggagtctgtcctgtgggtcttgggtcctgcagctaccctgggtttctcattgcttatctcttcctgatgaagattgatgccccgatgagtctgagcatcatgcagtgaggtgatgtctgaacctgccaagccccccatatgtcaggtattcagagtacccctccacgaggcccagctttctggaactcttccttctgagccagcagcctgcccctgtcatggcagatctcagcttccagcattctctattgcatgaatgccagagcaggaaaggctctgagctcaccagaagtatctctgctgatttcctcataagaggctccagaccatgctcctcccccttgtttctggctggagatcagtagctctatctgagataatgagtgtggcatctctttctgggacctctctcgacagccccagcttccatgactgagctctctagaaggtaaaagggagacaggcccagatgaggctgctgagggctccccatggctctgccagttgctcccaggtattcatggttggcacactcacacagacactctcaggtactcacactcatgcagacacaggagcagtacttaaaaacatacctctatacaaattcattcacacacagctgcactcagatctatactcacacacatccatatacaaaaacattccatgaacgcacatccctacacagaagcctgcatacatagccagactcagacacatacacacacaggtacacaatcacattacatggtacatgaagacatgtgtatatacacacttgcactgccatggcttaccctctaaagacaagcagtacccacagatacagatactcccacctgtgtgcgtggtgtaccatagccattgtcagtcttcccatgaagttccccaaggcggcgtcctgaagagcagatgtccccgggggctgtggacattaggaggctctttttttactcccttcccctgccatttgagcttgctgaacctgaaggatggaatctcttctttccccaggggcttatccttccccagaccattggaaggagcataaactttacagacagacatagattgaaattgccactccactacgtaatagctgtgtggcctggggcacatcacttggcctctctgagctacagtttcatgctctgaaaggtgagggcagtgaaactgctctagcagaaatgctgtgcaagtcccatgtggccacgtgtagagcacctggttagcaggtgcctctcaacatagcaggtactcactgtagctcagctgctgtcatctgccaagagggagaccgagccctattgtggcagcctggcaggatttacaatggattggatatgaaaacagacagaaggaagctttaacaagcaaaaactctgcccagctaaaggagtgctggcaagttagagaattagtgttggagctccaggcaggacctagcagttcaactgaagagagggacttaaagcttactggttggagggaaaggcaggaggcttctctttctatattttattgtggagttgggctggaaaaaaaaaaaaaaaacacaggactgtggtctagcagaataggatgctgggttcagtggaattttccattcattccctcttccattcattcattttttttttttattcagcctatgtgtactgaacatcttttatgtgctagacactgttctaagagtgagaatacagcagtcaacaaaataaatgagttccttttgctgcagtggacatcaaagtctgctcatagcaggaggctgcagtgtggatcccagtcccaccccctcttcctgcctctctagctgttacagagctttatcccagccccatacactagatgaccattcctagtccatgcccaagtgggaaaagttctgggttcaaatcctgaccctgctgcttcctggcagtgtgccctttggcaaaacacttaacctcccgaagcctcagtgttttcatctgtgaaattgtatgattctgtcgtagaagttcgtctctgattattttcatctttgaaaatattagtagcctatattgcaggctcatctcaggcttaaatgggatcaggtgtgtggcagagcccagcatatagtaagaactcagttaacagaaatctcttccatgtcttcttgcagaagacaggaacagttcatctcaagccacctggcccactgagagggtgtcattcacaacggatgacatcatcatgtccttgtgacctctcaccactctctcccttctctccccactccaggctgtgacctttggacatcgggacggcgcccagctgcctgggctcccgtcacctctccctccctactctgtcctctgccagctcaggaggccagagactcagcatcagagggtaccaaccccgaccgacctgggagcactggacaactgctcggcggcctccctgcacctcagacttgagcccttttcctcgggcagggttggggacccccgagctaggactgaaccggaccagccagggtgatgcgttattgatcagtgcggcccaggggacagcactaatgagagcactgcaggctgcacgtggtgcctttgggctatgggactaggacaggagaccccacgtgggggggctcacagacggggctatgtgtgtgtgtgtctgtgtgtttgacgttgttcactcttgtttccccttgacaagcaagagccagactgtcccaatgacggggcactcctcagttctgtctgtatgtggtaggttccagctgtaccatctgggaagctaagaggagggtacagagccgagtggcagcttagtcaaggctactgagccaagatcgagcagggaaggtcgggagtggctaagctcgttcctttggaaatatctgttttcagacaccccaacccgagcctgtcatggcgtgtggcacctttgcatagagctctgaagtacagtaggaaagttagaacgtcttttgagttctgggtctctctgggggacctattcccccatttctgctgttttctcctgttctctgagagtagcatcccttttcacctcactgcccgcacctccttgccatttggaaagccaagatgacttctgaggggctccttagagctcaccgtcattcagggcaccccctgaagtctggtccctgagaatcagggctctgggcagggagttctaggacattccttttcttccctcttctctgctactcacaccagtgaagcttattcccccaccaaggtggatgcgggttcttggggtacgtccatgttgggttatgtggctgtacctatgataacacgtttgcaaaagatttccctgcctgtcacccttgaggagtcctgttgggggagcacaaagggaggatgtttgttacacttctgcgttctttgctctagcctggtgcggggtcctcaagtagcttccccatcggaagcctgtgtccctcacctgtgtgtgttccctcagtgccccaccttccctccctcctcttgatcccaacctgggccggcgactcttcctgaccatgttggggaagcccctggtgttctgtatctgtaggaaggatgccgagagcaggctgggcatgcagatgggagaggagaacctctgggtcatttgcccatgttttcaaagccctgaccccctgcatgtgacctgatacaaaagggaaatctgtccccaagcagagcaatagcaggattatctgggcagtgaacaggaagcccagggcggccacagcccctctgtgtttcctgggtactacctgggccttagttttcttgtagctactatctatccaggcatctccctcctagagggccagagagaggaactggaacttcaaaaaccctacctgatcttactttcaaaatccaaatagacctatgaggatctcttccccaccttgggtgactcccagactggttcatgctctgggggccaaacctgcttccaaaccgggaagaatggtgagatcagtcatgcttcccaggagcctggctacaggaaacccctgtgtttcccaaagggccctcctgaattgcctttccaacactcccagcttactgggactagaggactaaagaccccggcttgggctgctcctaagcagacactgctcttctggggacatctatggctcttggcttgacgacgtgtgtgtgtcttggaggcattttatatatgtttgcctgagccccagccactctggggttgctggggatggctcttgtcaatggacacctccccatcccaacacaacactctgtg

SEQ ID NO: 4 - DNA, 2493 bp, Mus musculus
  CDS (1)..(2490)
atgaccgacgagcaggtgtgtgagaccgtggagaagtatggagccaaccaggaagagtgcgcccggctcaacgcctcactctcctgcctcaggaatgtgcacaaatcaggagggaatctctccaaacaagattggatcatccagtggcccaccacggagccagggcaggagagcaaccctgtgtgccccccggagcccagcccgtggatccgaacccacctctcccagagccccagggtccagaccaagtgtccccagcacttctgtcctaccagccctacgcctgggacccctgtgtacacccaagtggacagactcactgtagatgcctacccgaacttgtgcccgccgccgccacccctggaatcaggccaccgctctctgcccccgtctccccggcagcggcacgtagtccgcaccccacctcgcaccccaaatattgtcaccaccgtgaccccacctggcacgccacccatgaggagaaaaaacaagctgaagcctcccgggacgccacccccctcctctcggaagctcatccatctgatccctggcttcacagcgctgcacaggagcaaatcccacgagttccagctcgggaaccgtgtagacgaggccaacacacccaaagccaagaagaagagcaaacccttgaacctcaagatccacagcggcgtgggcagctgcgagaacatccccgcccagcaacgctctccgctcctgtccgagcgctccttgcggtccttctttgtgggccacgggcccttcctgccctccaccccacctgtccacactgaagccaatttctctgcaaacacactctctgtacctcgctggtcaccacagatcccacgcagagaccttggcaattccatcaagcacaggttttccaccaagtactggatgtctcagacgtgcacggtctgcgggaaagggatgctttttggcctcaagtgtaaaaactgcaagttaaagtgccacaataaatgcaccaaagaagccccgccctgtcacctcctgattatccaccgaggagacccagcaaggttagtgcgaacggagtcggtgccctgtgacatcaacaacccggtccggaagcctgcccgatattcagatctccacatcagtcagactctccccaaaaccaacaaaatcaacaaggaccacatccctgtcccttaccagccagactccagcagcaatccctcctccacgacgtcctccacgccctcctcaccggcaccccccctccctcccagcgccacgccgccttctcccctgcacccctccccgcagtgcccgagacagaaaaagaacttcaacctgccagcttcccactactacaaatacaagcaacagttcatcttcccagatgtggtgcctgtaccagagacacccacccgggcaccccaagtcatcctgcatcctgtcacctcaaatacaatcttggaaggaaacccattacttcaaattgaagtggaaccaacctccgagaacgaagagagccacaatgaagcagaggagtccgaggacgagtttgaagagatgaacctatccctcctctcagcccggagcttcccacgcaaagccagccagaccagcatcttccttcaggagtgggacatcccgtttgaacagctagagattggcgagctcatcgggaagggtcgcttcgggcaggtttaccacggacgctggcacggcgaggtggccatccggttgattgacatagagagggacaatgaggaccagcttaaggccttcaagcgggaagtgatggcctacaggcagacgaggcacgagaacgtggtgctcttcatgggagcctgcatgagcccaccccacttggccatcatcaccagcctctgtaagggacggacactctactctgtggtgagggacgccaagattgtcttggatgtcaacaaaaccaggcagatcgcgcaagagattgtaaagggcatgggctacctccacgccaaggggatccttcataaggacctcaaatcgaagaacgtcttctatgacaacggcaaagtggtcatcacagactttgggctcttcagcatttccggggtgctgcaggctggccggcgggacgacaaactgcggatccagaacggctggctgtgtcacctggccccagaaatcatccgccagctgtcccctgacacagaagaggacaagctcccattctccaagcactcggatgtctttgcgcttggcaccatctggtatgagctccacgccagggagtggccattcaagacccaaccagcagaggcaatcatttggcagatgggcacgggaatgaagcccaacctcagccagattggcatgggaaaagaaatctcggacatactgctcttctgctgggccttcgagcaggaagagcggcccacctttaccaagctcatggacatgctagagaaactgccaaagcgaaaccgccgcctgtcgcaccccggacatttctggaagtctgcagagctgtga

SEQ ID NO: 5 - protein, 830 aa, Mus musculus
MTDEQVCETVEKYGANQEECARLNASLSCLRNVHKSGGNLSKQDWIIQWPTTEPGQESNPVCPPEPSPWIRTHLSQSPRVQTKCPQHFCPTSPTPGTPVYTQVDRLTVDAYPNLCPPPPPLESGHRSLPPSPRQRHVVRTPPRTPNIVTTVTPPGTPPMRRKNKLKPPGTPPPSSRKLIHLIPGFTALHRSKSHEFQLGNRVDEANTPKAKKKSKPLNLKIHSGVGSCENIPAQQRSPLLSERSLRSFFVGHGPFLPSTPPVHTEANFSANTLSVPRWSPQIPRRDLGNSIKHRFSTKYWMSQTCTVCGKGMLFGLKCKNCKLKCHNKCTKEAPPCHLLIIHRGDPARLVRTESVPCDINNPVRKPARYSDLHISQTLPKTNKINKDHIPVPYQPDSSSNPSSTTSSTPSSPAPPLPPSATPPSPLHPSPQCPRQKKNFNLPASHYYKYKQQFIFPDVVPVPETPTRAPQVILHPVTSNTILEGNPLLQIEVEPTSENEESHNEAEESEDEFEEMNLSLLSARSFPRKASQTSIFLQEWDIPFEQLEIGELIGKGRFGQVYHGRWHGEVAIRLIDIERDNEDQLKAFKREVMAYRQTRHENVVLFMGACMSPPHLAIITSLCKGRTLYSVVRDAKIVLDVNKTRQIAQEIVKGMGYLHAKGILHKDLKSKNVFYDNGKVVITDFGLFSISGVLQAGRRDDKLRIQNGWLCHLAPEIIRQLSPDTEEDKLPFSKHSDVFALGTIWYELHAREWPFKTQPAEAIIWQMGTGMKPNLSQIGMGKEISDILLFCWAFEQEERPTFTKLMDMLEKLPKRNRRLSHPGHFWKSAEL

SEQ ID NO: 6 - DNA, 263852 bp, Mus musculus
  misc_feature (3814)..(4319): n is a, c, g, or t
  misc_feature (6552)..(6571): n is a, c, g, or t
  misc_feature (17206)..(17225): n is a, c, g, or t
  misc_feature (19680)..(19699): n is a, c, g, or t
  misc_feature (24320)..(24339): n is a, c, g, or t
  misc_feature (26572)..(26591): n is a, c, g, or t
  misc_feature (32986)..(33005): n is a, c, g, or t
  misc_feature (56103)..(56724): n is a, c, g, or t
  misc_feature (59672)..(59691): n is a, c, g, or t
  misc_feature (61525)..(61544): n is a, c, g, or t
  misc_feature (71035)..(71054): n is a, c, g, or t
  misc_feature (79771)..(79807): n is a, c, g, or t
  misc_feature (91343)..(91801): n is a, c, g, or t
  misc_feature (141749)..(141768): n is a, c, g, or t
  misc_feature (144739)..(144758): n is a, c, g, or t
  misc_feature (164171)..(164340): n is a, c, g, or t
  misc_feature (173689)..(173708): n is a, c, g, or t
  misc_feature (175051)..(175070): n is a, c, g, or t
  misc_feature (192924)..(192993): n is a, c, g, or t
  misc_feature (202010)..(202029): n is a, c, g, or t
  misc_feature (247837)..(247856): n is a, c, g, or t
  misc_feature (251852)..(252421): n is a, c, g, or t
tgggaattgaactcaggacctctggaagagcaatcagtgctcctaacctctgagccatctctccagcccacaaaattcctttctttggctcaggttgttatggctttcttcacctttgagccataaatgtgtgagcctaagcattagggtgatttgaccacacacacacacacacacacacacacacacacactttagggtaatctgacaccacacacacacacacacacacacacttcagggtaagctaaccacacacacacacacacacacacacacacacacacacacacacttcagagtaatctgaccacacactactcagggtataaccacacacaaaaacacacacacttcagggtaagctgaccacacacacacacacacacacacacacacacacacacacacacacacacacacacactcacacactttgaaatcatagcattaaaatgtacagtcaggtcctgcagcacgaagaaggctttagattgtatatctgtcctactgatcaaccactgtctactccacagtctaaagtcacctgaaaaaattcagaattgaatcagaataaattagtctttatcaggatatcctgtggccacatctgagagcaatgtcttgattgcttaatcatgcaggcaagcccagcccactgtgggtggtgccatccctaggcagacaggcctgggcctgggctgtaacaaagaggcagcaccctcagtggacgactgtgacctggaagtgtaagccccctaagccctccctccctcccaagctgcaaatggccagagtattttgtgagagcatccgggatcaaactagaacagccttgttctaaacgttcatcttgcatcccctgtacagagtccagctgaaggaggtttacctacactgtgttcttacttgtctctaggtgacccagttgctacctcctgtccccgtcctgacttcacagtcactctcggggtgttggctttgccctgtagctttgtgtgtgtgtgtgcgtgtgtatgaaaaatggaatttatgaaatttatagactctgctttccgtgaaatctatattttattgtaatacacagtcatggccacaagagggcagaaggagcccactaaattgcctgtgcatcaccactcatagatttataaaacttattaaataataatatactatgagtgtataaggtccttggctaccatagataatacgaatgaaggttcttattgtatatgtagagacacttgaaggctagtaaaaatcaaagcttgattggcagtcagtgtttgcagatttatttatgacagtgtttaaggaggggactctttggaatcctgcttctatccccagctcctttgtttagagaggtccttttccctgttctatactattcctcagctcatggtgctcagtacttttcaagattcatttccagcctcaagctatccataggtcttcttctagggaagccaagatcagaggccagccaatgaaactcggatttatgtctagctggcttgttctgagtcccctcccccgcaccccctcctcccggccaaattcagctgaggtatctactcccagaagtatgaaacagggcctgtctctcccgggtttcaaacctggactgtgagtgcggactgttgatcatgtactgagcgatcacctacgctcggcacttccatttgataagtgagaacaaggcccagacaagttaaatgatttgtccaagtggcaagtgggaggaggagactcaaccccagattcagccaagtttttgcatagtggagcatctttcactggctaccagcagagggcagtgtggacgctccctgctggttccctctgcagttctcctgagtgccacaagagggcgattgagagacaccactccattcccttgggcagggcgcttgggttcatgtccagctgactgcctttgtcccctcctctaggagatctcccctgaccagctgagcttggaggacctcctggagatgaccgacgagcaggtgtgtgagaccgtggagaagtatggagccaaccaggaagagtgcgcccggctcaacgcctcactctcctgcctcaggaatgtgcacaaatcaggtgagcagtccaggcattcgggattgtccccccagctggtcggccactgtccttcaagcttcctgtgcaggccagcacggaagagaatgggctctggataccaaagccagctttaggggcggagatgtctgtgagaggtggaagtgggcggggcttggacctcgccccgcagaggatggctcaaagtgggtcctggataattacggttcagatgtggtaatcttggctgtacaagggaggccggcatcttcccccctcagtcgtccagaagtggctttgtatgctgaatatgttctggttatttctgtgcacagacactatacattctttgtaacagaaatcaggttgtagctgctccagggaccagaagttgttattttagtatattctcttggcgcttggcacaatcctttcacaccagtgagtacatactgctctttctctctctccccctttctctctgtctctgtctctctctctccatacaagaggtcccaagttaaattctgtgacctttgctttattattttacgatctaaacatgtcatcatttacccccctggctccgtccaatcgcttgctcaaaactgtgatgcagggttagagctgtggctcagttaactggtaggatgcttgcctagtagacacaagactccgggtttgatccccagcacctcataaatggggtgtagtgggcatgcctacaaccccggccggcacttgggaggttgaagcaagaggagctggagcgcaagatcatccttggctacacagggagtttgaagccaaagtaggatgctggagaccatgtctcagaaggaaacggaaggaaacccatggtgtgagctgcagcctgctgaaggttgcttctgggctctctacaaattgttacaaatatcggccctgtcatttcagttctcaccacaaggtggcgccgtcgaccacaggaccggcccaatctgatggctgttaattcttaactctggttagtcaatatgcaacccgcaattacaatttacggagtgactgtgaatatggcaggagggcggaggacccagcagtgaaccagatagaacagggttccagcgcgcaggcctgatgacttccgctccattttaagatcccacgttaagaacaagacagttgtggtggcttaggttggtcaatctcagggccagggaggcatgactggctgatacccgaggcctgctggtcagggagccctgcctacccagccagttccagtttgcgagagactcagtctcaaaatacaaaacaaaacaaaagaaaaccccaaactgaaaatcccacaaacaaataaggtggatagcatggaaggggttggccgaggtccactctggtctccacacggacgtacagacatgaacatgtatgtgtgccgccctccaaactgcaccaaatcccagtgtgatcccaggaatagtttcctgcctagcagtctgcttctccgcgtggctccttgtggctgtgttctagccccgctcctctaccctggctcctgctctggatgcttcccctgtctcctgttttcctccagtcctgagagaactgctgtcttaagagagcgcatctctaggatgtcacaggagatgttcgcgatgatggatgttgcttcctggagagttccctctggattgctgtttccttatctctctgagggccagatggcttctcaatcgggtgnnnnnnnnnnnnnnnnnnnnnnnnnnnnnnnnnnnnnnnnnnnnnnnnnnnnnnnnnnnnnnnnnnnnnnnnnnnnnnnnnnnnnnnnnnnnnnnnnnnnnnnnnnnnnnnnnnnnnnnnnnnnnnnnnnnnnnnnnnnnnnnnnnnnnnnnnnnnnnnnnnnnnnnnnnnnnnnnnnnnnnnnnnnnnnnnnnnnnnnnnnnnnnnnnnnnnnnnnnnnnnnnnnnnnnnnnnnnnnnnnnnnnnnnnnnnnnnnnnnnnnnnnnnnnnnnnnnnnnnnnnnnnnnnnnnnnnnnnnnnnnnnnnnnnnnnnnnnnnnnnnnnnnnnnnnnnnnnnnnnnnnnnnnnnnnnnnnnnnnnnnnnnnnnnnnnnnnnnnnnnnnnnnnnnnnnnnnnnnnnnnnnnnnnnnnnnnnnnnnnnnnnnnnnnnnnnnnnnnnnnnnnnnnnnnnnnnnnnnnnnnnnnnnnnnnnnnnnnnnnnnnnnnnnnnnnnnnnnnnnnnnnnnacctgcctctgcctcccaagtgctgggagttaaagtatgtgcgcctccaccgcccggcaaccagatgtcttcttgtgcatggttttgacacagctgtgcaggaacagatctgagttacactccacccttgaccctcccccccatgcatgcacacacatgcacatgtgtagaatgtgttcagtgtcgtgtttcctgatacaggacccagcctggcgggcatggaggggaggtgggtatttcagattcattcctgttgtattctatagtgtcgccatttgtatatgtgtgatgctggtgactgtacccagagccttggccgtgccaggcaagtgttctaccaccgagtcacaacctcattgtattctgtcctctataccaaatgctggccatgacctgatactcacacaggacacttcggggttgtgatctgtggcctgaaaagctaaaagtctacgggttggagggatagctgagggtccagtgtactgactgctcttgcagaggatcctagtttgcttcccagtacccacttggtggctcacaactgcccgtaactccagttccgggggttctgatgttttgttctggcctctataaatgcctatatggatacacatatgtatcagaaactcagagaaagaagggggtggggcatgcgtgcacgtgcacacacacagtccaaaatacacattttacacctttagtcccagcacttgagagggcgaagcaggtggatctcttgagtttgaggccagcctggtctacctagcaagttcagaatagccagggctacctagtgagactctgtttcaagccaactaaacaacaaatctaatcttaagaaaagaaaaaaaaaaaacaaaacactagcgatgttggtcatgctgctagatctacgccatctcaggtccttctgaagttcccatggcaacagcttgctatttcccacttctcatgagtcaggacttggattcggaacaccagtggctatggctgttgctgctttgcaagacccccgtggcacacagggccaaggttggtgccactccttttggggaatgatgatcacccctctggtttccttgccaccagcccttccttctgtggtacccgcaggtagctatgtcacaacattgtgggcttttgcctatcactgggcaccctctgttatctgctccagggggtgtgtgttaatatccagtacacagtaagagtttaataagtgatttgaatatccgcttccccttgcctggcccaggacaacccaacaggcacttgaagcacgtctctctccagggactgaagacacacacctaaggagttagccctgtttggccatgggtctccatttcctttcaagccctaacatatatacttataattacttgtatgcttgtgtaggtgcatgtacagcacacccacatctgtgtgtatgtggatgcgtacacccgtgtggtgcccagagctcagaggaaggggcaggctatgtgtctccctcactccccacctggtcccttgaggcaggcacttttggaacctgggactcacgaagctggagccagcaagtcccagctgtccttttgtctctgccctcctcagggctgggcttctaggcatgtgctggatgcctggtttgttatgtgagagccaggatttgaactctagatctcctaattccagagaacactctgcccctaaatcttggtgagccacggattctgcggcaccccggatgaagtgtgggcgtcccgtctcaggcttgccccctctgtccagaactccctgtccctccccatttacatcctcagacccaaagctcctccaccccatcccaccccagagaccctttcgggatcccacaaactgagctgactcctgacctttgaccactagaacatcccgcacttcgggactccgaggactgtaccgtagagccctccccacctctccaacctcccctaacctttgtagcaggactttccggttgtaggcaggcaactgccgccctaggctcttggtctccggcatcctgaccaggttgaattaattgatccacattggacaaagtgcctgggagagctgcatgctgtgcctgctgtacatatccactaaggggcagcattgagccagccaccacggctccttcctgtttttaacactcttgtgccctcaaaaattgtaactacttccctgaagcttctaaacgcctcgggtctgggctaattcccacccnnnnnnnnnnnnnnnnnnnnccccgccccccgccttcccgtgtagctaaaaagtctagtcttaaactagtaagttgatgccttctccaccagactcctccctcccagggactgcgaagccccacagggtgcaatctggaccctctgttttgtctcctcctggctggatcgtcccaagtctgaaactgaagatcactcactcattcaacacagaggcctcttcaaggcaggctagcttaaccccatggatctggggtggatgaaaaccccaacatttgataactctccggctgctgccacacacctggtacggtttgccctgtggagatgtgcgctgggtagtcaggggggagaatggttttgttctgtgtgggtgaggacggagctgaggcagactccgcagcgcagcagcagcagcagcagcagcagcagcagcagcagcagcagcagcagcggcagcagcggcagcagaacacggtgcaggatgggggcatggatggcaggaagagtggagcaggccacagggtggcagatctttgggatgggtggtagtggtgattgtcacatgaacaggggacaaggtgtgccaccagctacttagctgcttttttctttctaatttctagttcctttagggtttttgtttgtttgtttttgttctttttttttttttttccgagacagggtttctctgtgtagccctggctgtcctggaactcactttgtagaccaggctggccttgaactcagaaatctgcctgcctctgcctcccaagtgctgggattaaaggcatgcgtcaccactgcccggctccgttaggtttttaatttgaattttatttttttgtaacagggacttacaggttcagaagcactgatctgagtgcttactctgtatctgctgggcctccagggttggcagccattctcagggaccgggggcttgtgcagagacttaaagtgagtgactcttctggaagttgtggggacaagcaggcttctgtggtggtagggggtatggagaaaaccccagggccgctaaagactggttgggcactaagtggttggtgcccatgagacagaggccactgcaaagcgttcacgcctgtcagtcacatgacctcagacagctgtgctggcgacagcataggggagccgctcagagcagggtgggacactgcacatccttcacggagctgggggaccgtgcagagagagagagagagagggttagagcaaggagctgcccctccccggcccaggtctttctttgctggtgtatttggtcctcccggcccctccggggtatcaggggatggggggagaacaggaagctgggaacaggaagcagagaggccctgaaatagagcagcctcagatgctctgtggcttcctaccagttgggctttgaatggagcccccagaagcacccccgtctcctttgactagaacaaagcccgaagagtggtcttgattgctccattgtgagccttgcttctgacttggagaaggatggaggaagagcagctccccttccaagagaggcctacagggacaaccgcgtgtgccggcaggacgccatggcccccttcccagggcctactctcagggtccctcccatctgtcccagaggcgcctctgtgcctgtggctcagccgcttaccctgtcactacccacgggaccgcctctgctttatcagtgctggagccagggtcacgatgatagggaatctctggcctagggacccatgttcctctagtgtctggtaatgcagcccccttgtctcctctatcaagaagagtttcaactggagaaactcttcatttccaccgacccactgcacagtggctagtgactacccttttgaccctatactttctagaactttccttgcatcaaaagagagtttgagtgtgctcacgcatgtgtgtgtgtacagatgcatatgtatgtacgcatgcatgtgaaagcagaagacgacctcaaaggccctgtgtcacgcgccacccgccttattttgcgacaggctctctgactgggctgggatttccaacttggtttacctgaggtcacagtgggtcacgaggacctggtgttgggaaggatggggagggaacatagggccagcaccccccgggtcacactttccattgccccaagggcaggtggcatccagggtgtgatggggactacttcaccctggctaaccccgacccagaatagcgcagggttctagaacctcgcacccaccatgatccaggtgggagatggttactctggagctggaagattgtcccaggggcattggctcacgtgagaatcaccatcaggaagcttggctttcagagctgaagggcagggtctccatcccgtgtcctacacaactcagaatcaaagatgggaggagcttgctttgggcaagtcatgtccgctctctgttgttggggcaccttcagtgcttacagcagtctctgctgcaggattggggtgtaaagcgttggttaaggtcagtttacccctctcccacctcccagtaactctcagcataccccaggctctggttacttttttggattttttttcacgtttacctccttatctcccacctcctccctcatacgaatgagaacacaggtctcacccgtgaagcttgcgttccttagggacagactgtttcctcccaggctctctttgtaactgggggtcagaatcacactggtgacctgcccagcccagggcttccctcccccctcccccctcccaccgtccacacttggccacctccacctcctgtcggtcatacattgctttgaagacttggggggaggggggtcagaggcttcccaggaagtgcctcgtgggaacaaggtgcctgccagctgtggctggtaccagaatttatgtctctggcacctggaagataatggtataagagaaggttcacaattgatggcgacctcgtgccatgtggttgacagaggaaggtctttgaggatcgtgaattagcaccaagcagtcttagaaaacgccggagttccaggctcctgaccccgttacccaatgtcttcagtagccaattacaaactcttggctttctccttgagctgggtctgccccaggacctttgcacgtgccgttctgcttgaactatgttcccctggctggttccttaccattttgatctccgctcaaagtctccttcttagagagccctgcgtctgtctcaggcagtttctgcctcgttaccaggtagtgtttttgtttgaaatgggtcaggtcccaggctggatcatcaactacagcactgactcccagagtcctccccacaaccatatggagtcccagtggaggtttcatttccttgtaaagaaatgaggcacagagaggctcattctttgcctggagtcacacagcagctgagtgccaaaagcgatgtttggactcaggtttgtctaacttctgagtcgaggttcttaggtcccagagcaacaggaacgactttctcttaactctggctgatccctgtgctctcatttgcccagagtgagacccagccctttgtgggttcaggagacaaaaggaagcagctaccatgccttgttccaactgacaatgcctgtgggcaagaccaccagccccaaggaccacccgcaagtgggaggaggccagacccagcttccaggacacagagagaaaacctctttgtggttgggcagcctggctgtggtctgagagagggtggggcctgatgagctgggggcgtagcttggcagcagtgcgttaggggcacatgcccaggaccctgggttctgtccccagctctgcaaagataagtaacttaggcaatacatcgtagcaaatctgcatggcagggagcacggggaaggtagcgttactttggaatgcactattttttgtagtagtgtagctgtagctggctccggtctccccagccgaagtcctgttgcatgtggccttggacttcttcccattgtttttttttttttttttaaagatttatttatttattatatgtaagtacactgtagctgtcttcagacacaccagaagagggagtcagatctcattagggatggttgtgagccaccatgtggttgctgggatttgaactcaggaccttcggaagagcagttgggtgctcttacctgctgagccatctcaccagcccccttcccattgttttttaggtgaccactttacagccaggtactgtaatggacagagaaatgcccaggctgtttgggaagaaaagattaaaacaatcccaaagggataagaggtctaatttgcatattattaatatttaaaaagtctgaaggaagacctggctagtccctcccacgcatcttgattgtcctaggcaacacccaagaggtcgtgaggcttcgacagaggtttgaagagaaataatcctcttctatttggtgtgtgaacatggtctgtacttcttgtggtacgcccacccctaccccacagcacagctttcaatggctcactcctggagtaagccccctattcctacccctccctggcctgtgttccctgcagccaactttccccccacgctggcaactctacactcaaggatgtgacagcttagaagctaccactccgaggcagccctcctggatcacacctgctccagcccctcagagctgctattttgtatctgtttgctatataaatcttccacttcagactctaggtccatcccgcagaagcaaaacaaacaaaaaacagtaaaaatgttgcaagtgtgtatgtgctgtgctcttccaagctgactttgaaagtgatgtcactagatcccccaccccgctttaaattctctttttatataagaacgaaggagcagggaggtggctcgtgggtcactcagcgagaaagtgcttgccccagaatgtgccttcttttttactagaaactatttagtgtgggaacaaaagtactggatgatttaagaagcccgtgagctcatttgattccacagtggagcctccccttcccgagggcagagggaggcaggaggtatttgcatgtttttcttgggagagaagagaggacaagcctgttctgagtgagtgttggtggtgggacaaaggacaagcaagtgagggcatcctctctgctggcccgtagcctactatttgttgttctgttctgttttgttttgttttgtttttttgagacagggtttctctgtgtagctctggctgtcctggaactcactctgtagaccaggctggcctggaactcagaaatccacctgcctctgcctcccaagtgctgggattaaaggcatgcaccactaaaatcaacttttattagcacattgccatatacttgtttgtatgttgtctaaggctagcttttttttgttttgagacagtgccccaggctatcctctgactcctcatcctcctgcctcagcattccaggtgctgggcacccacaggcatgcacccacaggtctgactactgtgttttttatcattaacaccagaagtgtttggcatggcagagactgcgcacctcgagaagcctgaaatatttactatctggcgctttagaggaaacatttgttaaccttaaaataagatggagaatgtgagaaaaaaatgtgttaaataaaacacacacgactctaaagtgggcggggtttggtgtgatatggagaaggacttcctttagggggagagcctagggaggtgttgatgagaacactgtgggctgctgtgcatagactgttaggcgtgtggtgccgtgtgtcgtgcggagccagcattcacagggaacttaaagataaatgctcgagggaggcagaaataaagaacatgcccagagagctttataacttgccctgggtaacacagctaataccaaatagaggacccgagtaaatctcatcctgtcttacttagagttactattgctgggctgaaacaccaggactaaaagcaacttggggaggaaagggtttattcagcttacacttccacatcagtgatcatcagtgtaggaagtcagagcaggaactcaagtagggcaggaacctaggggcaagagctaatacagaggccatggaagggtgctgcttactggcttgctccccatggcttgctcagccggctttcttatggaacccggaaccaccagcccttggatggctccacccacaatgggcttgccccacccacagtgggcggggcccttcaccgctgatcattgattaagaaaatgccctactggctcgcctccagccaatcttatggaggagtttcctcaattgaagttccttcttagacgaatctagcttgtattaaagttggcataaaaccagccagcacacaccccaagtaggtgctcccacgaagtagtggtctgtgaccatcaaaacagatttctctagcgagtcgaggtgcccgggatgtggatgtcatatggacagaacttgctgaatgccattcccactgggcagctccttgttccccttgggcaaatgtaggttgcgcccaaagggattttgaactacggggccacctcacatccccacaggaagcctgaaactaccctttcctcccacccccagagagaagctgttgggctgggttggcccacaccagccctgcccttgggatcagcgctcagtgtagcggcatcacccgaaactttttcctttttttgagcatttgttttcttctgctctgtcagttactttgtggagaagagatggggtgggggtggggatagggatgggacttgctttgctttgtaactggattccaggtggccctgtgaagtagctgatagactgtcaggtgttggtgtgcctacatcagtgcggtgagccacagaactgaggggcaggcttgtatgtttgctttgtatatttgattctagcagggtcaaacgaccaaggtgcgcttgtgatgatgcagtaccatatatggccaccaggaggcgctgtctaacaatcttcctttggcccgactgcagattccctggaagagatgcatcatcagcttgtgcaaactggaaccagagttaaatctttggaaatcgaggccgggggttggtggggggcggggggaggggaactgaggcctggggtttggggaaggttggatccagacacagcaggaaacgattgtggatgtaattcacagactgagcttcctggtgtactgacacccaggagtgcgttctgcaatttggtctcttaccggctggtcctggtatgcggacgtctgagcaggttcacagcttctgtccgttctggtctgatcagaagggaccttgctgtcactcaccccctcctagcatcctgtcacccaggcccaggtgacggttaccctgccaattaagctctgaaaaggaagtactctcttccaggtaccagcagataatggtggagttgaatcaggccagagctccttgttttttttgtttttttttttttttaataggacattggaaagagccagatagagctgaaaagacccgagggtgggatctggggctagctccggctgtggagatgccttcccaaagccagtcagtagagatattagggagagaagggaaaaaccttgagtttaagtgctgacctgcatcttagcctttaatatggggtccagcaaacagacgaaaacaaaaaccaaaataagcaaaaagggcacagacatatgcacgggcacagatgtatgcgcaggcgccacaggcccagtttgacagaggcaggggcctggcaccttctttcacctgccctggccagcctgtggctctgttgggtgtctggagggtgtgtgtgtgggaggtttgtttcttcgattccttgtagttttactgactggctctgggagggtgtgtctacagctggatcccaccctcgggtctttctgggtcttttcggctctttccagctctttccgatgtcctatttaaaaaaaagggaccactgcctgggatgtctagtcctagcctttcctgctggcccaaccacttctagggcacacagagggggcactgtcttggcagtgagtatagtcccctgtaggctcttgggcctttgagctgtaaatcacagacctgaagaaaggaattcctcccctgtgcctcagtcacccccgagctgtgactgcaccacctgcctatagtgggtttccagaagactgtttcatccagggctgagccatcctgtgaactcagtagagagcagaaacccttgagcttacagaagccattttcctgtggatggagggagaaacccttgagccccgctagcgaattagagcagaagaaaagtgctggagccatagccgacctttctgtaacatagctgtgaagtcgcccatggtctgtcacagagactggatttatgtccccagagggaatgtgtttccagcctagaggactcgcaggctggggactgtcaactcgtaagagggtccttccttaatacaaattgttctggggacaggtggggtatccagactcaggatcagggtcgccgactgggcgatgtgggacgggacgcgttcctggagtttctgggtagccgtggagctatctcagtcacagtgtctctaattgctgttgacctcagagggcctgggttactgtgagggtgctaggttgtgcacatttttgacttccacccgtgtggtgtcagcagggcctgtgcctctccacctcagacctgtcaatcaaaagcatctccgagcgcccagggatgaactgcaggcccagcaggcttgggagtcctgggttccatcctcagtaccaggaaatgaacgagtgagcaaacagacaaagagacacattgcagcatcagcagcacttattaggggaagattgctgtggttgggaccatgaaccgacttctctgaagagctgtggggttcccacagctgtgggatgatgcgggcgaccagggagatggcagctgaagtactctgaagccagatgaaagtcaggagagcccgtgggagccgaggctctgtcgaaggcataggaagctgtaattgagttggtgtgaaggctggtgagggctggagtctggctttccgtgtgtgtgtgtgtgtgtgtgtgtgtgtgtgtgtgtatgtgtgtgtgtggggggggggcgtagtccaggaagcagaggagagctgggaattttgatgtacatacatgtgtgcacaggtgtacacacatgtatgcacacacagtaatacatagatacacacttagccatgcacagacatacaccaacactcagaaatgtgcatgtgtgtgtatacaccagcacacacatacatacatacatacatacatacatacatagacacagacaagcaacatgcagacacataccagctatcagatttgaaggcaaacaacagcccctggtagctcaggaaggaagctagagatgaggccagggtgatggggaccaggtcgctggccaccctgggtttggtgtcttgggacactcctggagacaggatgggtctgttgacatcctaccaacgcctctgctgggaataaccatgccaaacctggcgcagggtctccgactcgagctttgaactcgctctcatgtggaggtcaggtcatctcttcacactttgtttcgctgctttgatcctcagaaatgaatttctttggaccctagctcctcccgacgtggctcagtccagcgtgttaaggtatcgagcatcaacgcagttgtcattagtatagcgagcagtaacaagctggttacttatcggtaccaccatggatcttgctgaagactggggaagcccaggggctggggaagcagaacagaatcctcccggatcctgtgaattttcagggtcttgggggagggtagcgccctattccggtttccttcctgtttcctgcttcccagcttcttttcattcatgcaccagatgccaagttacgaatccgctcagcattctttttcctgcacagcgtcacagctcagaaatattttttaataccttcttggaccattttgggttgtaaaagccggcagtcttgagagatggctcagtggttaagagcactggcttctttaattgtgaaccgtggtttcattcctagtagccacatggtggctcgcaaccttctgtaacccccctcctggggggggggggggatgtctgacgccctcttctggcatcatcaggtactgcaccccttccccccttggtgcaatgcaatattaaggcaaacattagatgaaaagaaatctttaaaaagtccatagatgtttcaaggtggatgttagtgaggtccctgctgggagaaagtggggttcaagtgtccatgttgtcttagagagtagtttcagttcctaggcagggtcacagctcctcccattgccctttgacctttgtgccaaagagttatgggaagaagaggaagtgatcttaggtctagggcttatgcagaatatccttaaagtatgtttggatgtggtagttctaagtccagacttttttatttcccttccctttcccttccccttccccttccccttccttccttccttccttccttccttccttccctccttccctccttccctccttccttccttccctctctctctccctttcctctttcttttctttttctttttnnnnnnnnnnnnnnnnnnnncctttccccttccccttccccttccccttccccttccccttccttccttccttccttccttccttccttccttccttccctccttccctccttccctccttccctccttccttccttccctctctctctccctttcctctttcttttctttttcttttttagctaaggtatttacagtggcttgtagggcccagaaacagttgagatggtggtggtggtggtggtggtggtggtggtggtggtggtggtggtggtgtgtgtttgtgtgtgtgtgtgtgtgagtgatatccttctgaagaaaggcttggtcttttttgaatgtctcagagccaatgaatgtggaaatgatatgaaatgtgctcatcttgcgtgactctcttcacggatgtttgtcttgccctgatggtcagtgggagcaggtttgtgcccacaatgggctctttgcacacgctgtgtgcacagacgcttctgtggaggaccccagaaccacaccttttcaggcagatcttgcgctgtctgttgtatgagaagagttaagctcagagcgatggatggccaaggctgcacccgggacagtcatgaagtcagtgtcacctggaggagctcgctctgtggctgcggtagtcgccttcatcttgaaggcaggcattttggccaaggtcacccaacaggatttagtcagatttgtctgaaatctctggagcttcaagagcacaggctgaattcgagggtggggggttcacatcccgagtgaaagccatgaccgtttcaaggacagtgtgctagccacatccaggaagtgctggcagatggttggatgtcctaggaggaggagggaacaggggcatgttggtggggaggaaggagaaagggtagggtagtggaactttggaactttggactttggagtataaagggatgctctactgggtcagccctgcccctggcttgctctgcaatgccagctggatgctggcccgtcctctgagagtctattgggagttttgtcagtgggctgcgttgtaccagagatgtgggcatcatctctgcacacaaaagccagttagaggctggtgagatggctcatcagagcaaggtgcttgtctgctgacaagctagactcttgagacctacatagaagaagaagagaccgtccctgcaggttgtcctctgacctctacacatgtacacacatgaacacacaaacataaataaaacaaacaaaatgtaaaaaaaaacacattaacacttcagttgactctcttgctggaccgtcatgatacaaacttgatagggggaaaagaaaccctttgttgtcgttgttggtgtgtccttaaaaacagaggtgggttcactgactcttgaggtgagggtgaccaagatggcctggccttagcatgccgctcatgcacacattaagtgggaaccagcacccatcgagtacctgctgtgttcccaggactctgcagggtgattgctctgtggcctttggcctctctgggttggcactgcctggcctggaaatactgttaaaccagaggagaatcaagaggaaaaaagatcagatccacagttgcctatttaaagcaagttgtattttggggtgcatctgggactggtcagcctggtcttaccttaagtggggatttgggagagacgcctctgctggcttcttgaagtcctttttataggagggataaagcattcacaggggcgggagagtcggcttgatacattgttacaaagatacaatgaaagggaaggaacagggtaaggatattatacatcttgtccccagtttagtgtaggctgaaaaacatgttttgcactttacatcggatccaagaaaaaggcacttattcttagttgcaaatagaaactttaactcagaatgacctaccacaggacaagaaggaacttgttaacggtcctaagagcaaagagaaccttagcctgcaaggtgtgttgttcttggtttggtctctcagtaccatccttggggttgttttgggaatgaaatgagatcagatacaggcgaaccgtatcttgttgctaccaaggcagcaactacacgtgctgtgtagtgttcacacctacatggttttaatccatccccagtcctcccagaatattcctccaactccagtttactttccccagctaccttatttgtggattaagggcatttgaagatttatttattttatgtctatgaatacactgtcgctatcttcagatgcaccagaagagggcgccagataccattacagatggttgtgggccaccttgtggttgctgggaattgaattcaggacctctgggagagtagtcagtgctcttaaccgctaaggcatctctccagctctaaggacatttaaaagagagtattatgtcaatttggggtgtgtgtgtgtgtgtgtgtgtgtgtgtgtgtgtgagagagagagagagagannnnnnnnnnnnnnnnnnnnagagagagagagagagagagagagagagagagaatgctagagagagagagagagagagtaagaagggggagcgagggagcgagcacacatacacttttggtcagaggacaacttgaagagctgatcctctcctaccatgaggagtccaaggatcaaactcagctctccaggtttggctgtaagcaccatcacctgctgagggagctttcaaaccgaagcctggtgttcttgctcccaatttctggatgagggacccacaaaggaacaggctctggctgtccctttccgattctagtgagagactggccagatggcacatttgtcggcgtggaacaggcgaggcatgaaatctctggaagtaaagaggttacgcaaggctgtttgggggaaagcatgagccgagaagtgagctctcaggaggcagtttagaaagaacccaggctttctctgccgatgtgtttattggtggagggtaagagagagaaaggagcccctgcccgtgtgggtggatgtgatcaagtgcgacaggagtgtatgagataggggtgtcggagagccacttgttctgaggtgggggctagttttcaattctccactctgccacttctccaggaagcaggggcttgcaggaagtcagatttgggaacatgtcacatctcctttctctcctagtcaagaaatctatttatttaattaaatttccgatgggtttctgctcccctcccccccctctgccctgcagctaatttttgcttctgttttctttctttctctagacatcggttaggccagaacgcatcaacagaagtgacagcatcaataataggaataatagagatggtaatgcccaaacagtgccctgtcttctggaatcttctgttggtggctggtcaccttgtctctttagatgaatctgttgctcactttgggttaaattttgttctgcccgtggctgctttaagggccagaggggtctctctctctctctctctctctctctctctctctctctctctctctctcctctttcatctatgtctgcaggaaaatagaggagtctttgctaacaatgaggctgtctgcttcatgtctcatgtactgaatagtctaattcagggtccaggaaactataccaaatctggcccaccatttgcatcttaaataaagttttattaaagcatagccacacccacttatttacatattgtttacctctgctttctgctgtaatggcaagactcagtggttacaacaaatatgttctatcctgccctttacagaaaagattttcagagttcctccgcccttgactggttatttctgtggtttcctgactgattctgacacgagtgtttgtgaacaagtggattcaagttgcttttgtggttgtggatcattcattgtaccaagccggtgttagatccaagggacttagggaatgattcttatctttggggacaattgtgacacagtaaggtacagagcaagagtcagctgcagaggtgactggacagatgaaacaggaaaatttggggggctgaggaagtatggggaattgtggagcagaggacattgaagatggatataaagacaatggtacctgatggttgtggaatcctgacctcctgggtacaggagaagctgtcagtgggctgtggggatgaggcaaagtgagacccgaagagatgggaatgggacaaacctggacaagggcttgggggaggaaaagagagggtgaggttagtcagaaaggggagagatggggtcgggggtggggttctaaggaagacaatgacaacttctgtgtcttcattttcaatggtgactgattccaagcgggagcagagtgtggttgacttggttcatcagtcctgaggggaagccaaggttaccctgtttgcaggtggtgttagagcaggctatgtccctcaggtcctagtttagtggttctcaaccttcctagcactgtgacccgttaacacagttctccatgcggtggtgacccacagccataaaattctttcactgctacttcataactgcaattttgctactgttatgaatcgtaatataaatatctgatatgcaggatatctgatatgtgacccctgtgaaaagttattcaacctccaaaggggtcgtaacctatagaggttgagaaccgctgacccagagactgactttgtacttttagaagtgaccacggaaatgtcagctctcccgggcatagtttctgttttacagaggtatgccaaggacatttgggtagaaagacagagagggaatctggtgttttccacaaggacttgacaagttccgcaggggacaggcaggggctttggattctgggtgttctttggaaacttgtggtcagagctggagaagtaggaagcagggtgtgccgtccaagagtttggggtgaggcttgctcagtgctgttctgggccgggccctgcacactgtccacactcctgggattgagatggcggtggtcagagcccctgattgtctggttctcactggtactctctaaagtgtggataacatgcttgagctgtgaccacagagcagaggcagagggtcacacttaagtctaacataggaggtactgaagatcatcatgcacattggtcaactgagctttgaaagttgttttgttaccagctgggtcatcctggggagagttacttagcctctctgggcctttggctcttcttttacaaaaggacagttcttcaactcacacatagaatctttgaatgtaatgtgtagacaaagatgacccggagcttctgatccactggtgtccacctcccaattgctggaattacagcatgagcctcccctccccatacctgatttgtgcagtgctgggagtcaacttcatggcttcatgcctgctagacaaacactctacccatggggctgctccttaagcccccacagaggttttgtttgcttgtttgttttctgtttggttcttgtttgttacttttttgagagtctcctgaagcccaaacagtatatgtgtgcacaaatatgtgcaaatgcacatgcaggtatgcacaaacatgtgcttaactgtgtggcaagtgtgtacacaaacacatgcacacgcacacacacaagtgtgtgcacaagtgtggacatgcccatggagaccagaagctaatgttgtgcatcttcttcagtcactctctctccttatatggaaggagagcatcaatctgaacctagagccggctggttggcctgtccagctagctggcttcctctgggtatcttctgtctctgtctccccagagctgagcttacggctgggctcccacgctcccacagtatttacacttgtgttgggagccaaactctggtcctcatctgtgtgtgtaagccttgtccctgctgagttatctctccagacccattcacgggtctctgacaaggcagtaagcaaggcagggacaacgaggaagctacgtgttcaaggatatgttagacagaagtagacagcctcattctgctccctacttggtgcctggtaccccatggcggtggtccaacttactttccaaggtgacgtcacatggctgtctttatgttcatgtaacagaaaagaaactggaggcaagggtctgaattgccaggggcagctagtcagcagctggtcagtatcagggccaggtggccgagactctagtgtctggacctgaaactctgacctaggcagtgatgctggtgagacccagactccaggtacatgtgcagagatgaccacaggttgcaaagaggatatatctgcagtggcctggtgcctgtgcacaaggtacagcaggctctttttaatcttttaaaagttcaactctgtgtgcgtctccctcccccccacccccgccccaaccccatcttcttttttaatggcttgtttaataggaggagagtctggggtccctaagatcagctttgcaataggcagcgagtccccggaggatggtgccttgggcttcgggaactgtgtgaccatgagtgtgttttgaacaagcccttgctaaatgctaatatgcctctgtcagtcttcgcttcttgagagtcaccccgtgggcttcttgtctctgtcacttgtcattttctggatatttagaaagccaggggcttgatctcttccctaagaagcagtttgtgttagaagtgggcttgtgatcttgttgcctacgtgagtgtttttcttgtctcccttagtttttagaaaaatcttccttttcccttttccagtgtctggcagcctggccctgcctggattatctaagatggtctaatggctgacatcagcccccagggataggacactgtctggctctagctgagattcaggaaagggttgtgtgggttttgcagtttcaaaggctttgtggctcctgggttgtggcttccttggaggcaaagtggttttatacaggtgatgcctaagcaaagtggagtgcagccattttcagtagcagttagcctgtatgtgggtgagaagactatggtgtgttcatttgcttattcttcctctctctctcccatggtcctctttttcatcatcctcccttttagctatgcctatctgtctttctgtccatcnnnnnnnnnnnnnnnnnnnngaccgaggccacgatacagagaaggtggatgtgagctggaggtcactgcaggatgcctaggaacccctctgaagaaagaggggaaggcaaggggccactctgggtcactaagcatgggtagatggcacactggttttccgtctccagagggtttcctgtaggaagggaaagggtttttttcccttggtctcctgcaaccccagggggataaggggactgaggtgaggagactcagggcttgggaagggttggctgggccactggatggggcaagttgccccagggaccctagtaggcttgtcccgtttccacaggaagaagtcccagcacagcggagtgttccccaagcttcatacggcgctgtgtggacaggctcacgtttttggccaggtaatcaacagcagctggaaagagagagaagcttctagaaactgaggttcttttcatacatccttccacttaaccttcatccatctgtccatctgtccatccaaccaccgttccatccatcctaaccagctcttgtccatccacccatccacctataacatccatctattcatctgtttacccatgcatcttactaatctatccatccagcctccttttcttccattcttctgcacattcacaaatctatttatccatcttctactccatcccttcttccagccatgtatccttctctccttctatctactcatccatccatccatccatccatctatccatccatccatccatccatccacccacccatccatccagccatctatctattcatccattcatccatccaccccctatccaaccatccactcacgtacccatcttcccacatactgatcttctcacccactcatccacccatctaccgtcccctccatctcccacctatctgcccacccatctatccagtctgtaggcgttccatactgtccttgcaccaagggctccacagcgtgctggagatgtaaagtttctgagcaaatactctgctgtggaccacactgtttgaggagggagacagttgttaaactattcaagggagaaactatttgagaatctgataaacggcatgaagaaagtggggagaaagagagagagagagagagagagagagagagagagagaagagaactaaacagttgttgaaggacatctgtcttaggaagtaacatgtagttacaggcagcagaaaggggaaggggatagtagaaagttgccctagacagggaatggcaacacaaagggatggggtatgtttttctatggggaatgagcttgatttctggtgtgtgcaggtacaacagccaaacccttatctagctgtggccatattcatccacctaacagtgaggtaggtaagaaggcatcaggaaagtaatgaagatggcagcgtctgctatgggtccgtaactcagtgccaggccttgtgttaaggactttccatgtgttctttccattaactctccaattgtcacctcaagctgggtaccgttccttctccattctgcagatgaagaagatagaggctgaaagaggttaggtcacatgtcgtttcccaaggactgactggcagagaatctgagcctagacctggtccccaagttcatgcctcctcatcttgactccgcagggttatgatgtaacaaaacctcaggaacagggtgtgattgttcaggtgtgaggctcagatgctaatgaactctcttgctttgaattgggaggttgaccagatgacccatatgtgaacttctactcctagtcttctgaaaggtccctagtgttggtggatcctgagtgtgttgacacagttttgatatttttctgaagcctgagcccctgggtgggtgacgaaggacacctttcctctgatagtgagtggtgatgcctaggccttggccctaagccttccagtttcttcctgtttctgcttcccggggttctgtggccagagcctggcttttcaaattggcttcaaagataacgatctgacttagtgatttatctgattagacttaaatgtatttattacatgtttaaacatatcccagtgagctggggaaacgaaccacaggactggcctgggctgaatttccgggacccgctggagcaagttcaagaaaaacctaatctacttagagaaaaaccagagctaagtctaatccaatcagcgtgctcttgaggcaggacaccccacctcctgcctgtaaccctgatgccccccgannnnnnnnnnnnnnnnnnnntgcatttcagtgatactgtcctgaaccacccccaccccacagtttgggtgttactccgtatcccaggatggccttgaactcagcatcctcctgcctctgcttccctagtgctgggacagcagaattctgccaccacacctgcctctgacatccgtgtctctaaagacagttgtctcatggtgcagccagtggtgttgttcacttcacagttatagaatggtttcaggggaccaagagcttgcctagaagtgacagctacccctgtaaaccaacccaggatgtttgtcagtcgtgactcaggcggcagcctgcagttcagtacgccatcatcttgaagatggcctccagaaacacttctgaacagaccacactgggcagtttcttcccatctctgtgggttcaatgccatcaacattttaatgttttgtagtttatagatgggtatattgagagagagagagagagagagagagagagagagagagagagaatgctacatcttacccttgaccagggctcacagcttctatccttgttcattttttttttgtttgtttgtttttttttttttgtttttttgagacagggtttctctgtgtagccctggctgtcctggaactcactctgtagaccaggctggcctcgaactcagaaatccacctgcctctgcctcccaagtactgggattaaaggtgtgcgccaccactgcccggttctatccttgttcatagccactaattacaagcttgctcatctcccataggagggaaccaaggctggaaagagcagaaaaatcttttcaaagccaaatggggacatggagtttggactttagctgtgtggccttaacgacctgcttgtaacccaggctcagtgtataccccaaggagcactccgagagtgagggtagggtgaccaaggcccttgcaggtcagagatcttcaccatttgcctagctcccaaggtcttgtgggtagtatttactgtgttgacacacagagatggggatgcacaaggggctattaaggggtcaaataagattgtactccatgagaatctctctctctctctctctctctctctctctctctctctctctctctctctctgtatcccaggccagcattgaactcctgatcttccaggagcaagtgatgggaccacaggcccgtgtcttcacacccagctaggggctttctcttttaggagtgtcaagcttgtcctaggcaggtaactgtgcactcacatgtgtttcagttccagtaaatgtccctccccactgcccctttcctctatttattgagtcattaattagaggcatctaatttcccacgctggttcagtctgggaatgtggggaagggtgatcaagagagagagagagagagagagagagagagcgagggagtgaacgagaggaatgagatcattatccccgtcacactccgagcctaatgaagttttgcgagaatggttttgaaattcagaggcaaagaagagacaggaagtctttggggacacctcctcagcaaactctcttttccagggggaggagagcgggtctcagaaaggctgtgaagttctcagacggcttgccaaagtcctctcatccaggaggggttgaacttggttcgaggtttcacagcgagttcagagaaaacaaggttgtgccatgatccagctcctgcaaacaggagcttgtcaggctagacgcacctgcttctggaagcttcttggtgctgtgcagtgcttgggtgcaagtccttcccccatggctctgagctggggtctcttgctgtccgttagaccatcagctgacccattcgctatctcagccactcttggctctgtagagtgcaggtggcatggtgttgaaggtgagagttatcctgtatgtaagaattagctaaaatatttcctaagctcagtgcccggcctctgggttgcagattgccgtggcaacctttgctcttgtcaggttctgtgatgagccctggacacccaccacacatgcaagaagatacaattgctggaggagttgcacaggtacccaagattaggtgggatatgtgccacagccgtagcgtgagagtggaggtcagaggtccacctcaagggtcagccctggtcttccttcttgttccaggcaatgtccctctgtagcttgctgctatgccatctccctcctgggctctctcctgtctctgcctctgtctcctggtaggagcacacagatcacaaacacctgtgctattgtctggctcttccgtgcatcccgaggactgtcgatgggcgtgacggggattgtgctgcaggtgccctgcccatccagccatttttcagccaccgtacataccattctgggagctcagtgtttgaaagctgtgtggcttggtgctactccacaccgacgcatacatacgaacctgtcttgatctttttcctggcttcctagtatttcgatgttccggccagtacctgtagaaaaagggaaagtttccttttcattaggtgatagggcttctgggagagacaagttcattggctcactagagggctatttaatcctcctgttttattagcatggcttaatcccccatactttttgacagtctttccttgaacccagagctttgccgtctggctaatctggtggcccctgagctgtctcagcctcctcagcacgagggttccaggtgtgtgtcctgtgcctggatttcacatgggtccctatgctggcgcagcaaacgctttaaccactgagctctcctgcccccatcccttcgtctgttactatgttgccttcaatccagtgaatccaaaacagagtccttaagacaggtcactgttgccaaagtttttattcttatttggtggtgctggggggaactgaaggggggaggggtgtcccctgaccgagtccaaagccatccctcaaaatccaaaatcgcttcctttcccagaagggttggcagaagggctgaaggtagtaggggatggtgtcatatatctgatgatgtaagctatgatcaggctctcgatgggagaggtgttgatacggggaacagagcaaggcaggagggtggaagtggtcttgcactcgcttgggtgctagtgaaggaacactgttctatgcgctggggctacctccggtgttggcaactccgagacttatgccctacttggaagctggagaatcttcagctctgatcttcttgggaaaacatcccagcaagaccattctctggctgctgttcccccagcgagcaagcgcactcctgacctccagctttgttttacaagctccttagccctacaccttgttttaatctgatctccctcccccacccgccccaaatcaagagaaacaaaattgctaacaatccctgtggcgtctgggatgggcaagcagtcagggtggctgtagctgagaggggtaaggtgactggattatggatacttgtcacctgttttcctgtttgcatttgtgtgtggtgtgcagcggtgatggcgtggtttccatggctggtgtctggctccaggcacaggctcctaactattctctggatgattggagaggggaatcggatactaaatatgggaaaatgatggagacaggagaattagaacttggtgtgtgtgtgtgtgtgtgtgtgtgtttgtgttcgtgcatgcatacatgcacattcatgtgtgagcatttgcatattcctgtggggggcctgacgttcatatagggaactgattggtcttctacagtatttgttgagtgaaggccttagtcaaacccagagctcacagatatagctagtcttactagccagctctctctgggcatgctccgtctctaccttataggtgggctgccacacccacccagcatttatgtggatttccaggaccccagctcaggacctgatgctttcacaagctctgtaactgctgagtcatctcctagctccgagtacccattatcacctttaaaattgtgaggcgaggggttagttctaactcagcacccttctgtgacagttcatagcgcagaggcagttggttagctatgtatggtctgtgctgcagagaaccaaggaaacagaacaattccccccgccccgccccgccccgcccccaaatccaaagaaaccccaggcaagctcaagcggttttgcccgtacccgaccttgggggaccttggcctcagtgagggcttctcctggactcccgagtccccagcccccagcgcagagctgccttgatggggtggtcatgattggctatcacagaggcccacagcgggcgggatgctttcccctcttcccagggcgcctgaatcactgtctctttccccaatcgctctggtaattggaggcaagcgatggcatccatcctccgagttctaatccccctgtctccatcttttccccatatttagcatccaattcccctctcgttcattctgcaaatagttagggagcccgttctgggagccggtaccggctgtgcgggagcgataaagcagggtgaatgaggcccccgttcttgggggacttctcttcagccggggagtgagccaacaagcaaataaatggagtcgtcaggcggttccagcaagtgctgagtcgtgggtgggggtggtggggaagcactcaagtcgagggatgcagagctgtgggtgaggaggggggtgtctgttcgagggtgacatttgtacagccgagggagtcctgtgggaactgctttacccttctccaccggcccctgtggacatttggcaaccctggaggcacgttggggtgtggcaaaggggcagtcggactaataggcatttagttcgcaggaactcaggcctgctaacatcctcccagccctcagctgagagtaatccaaggctgaacttaagggtgctgtggatggagacccctggggtccaggcatgcatggtgggatgaagccaatatcatgggccagaggtttccagagaggttgtgagtaagaggccctggggatggggtggggtgggtaaatacagctttttttgattatttcagaagggagacctcagggtctcagcggctaaacacgaatgtttgttcctaagccccacaacattcatgggtactcttgcctgaggccgggatgctccaagaagccattcattctggaaggcaggactcaggctccagcctcatcacaacacatgtacagggtccctggagggatggggagggtacatggagggggctttgaagtgttgggtctcacttctacctatattgcattgccacactctggctgcaaagcatgctgggaaatgatgtctagctgtgacctaagaggaaagagaggtgtaaggcattgatggggctggaatccagagcttggcaggccttgaaggccagagctacatcttctggtttttcagtcatcatggtagaaagccttgctcttatggtttagcagggagtggaccccacccgtgtacaaagccccgggctaaatgtccaaagaaagtagcctttaattttttttttatttctttgaagatttatttatttatttcatgtatatgagtacactgtagctgtactgttggttgtgagccaccatgtggtttctgggatttgaactcaggacctctggaagagcagtcagtgctcttaatcactgagccatctctccagacctaattttcatgtcaatcacttgtaagacttccctgtgtggctcccatcatagagatgggggaaactgaggtttagggatgctaggggtaaggttggacctgggacttctgcccgtgtcgtcagtggcagtgacggatgctgtgggatgaacgttacccctgctttatctccgctgacgactagctctgccgtggatttctggactgaagtgctgcttcagtgagtccaaggtcaaggtggatgtgtaaacagagtcattagcctcctcctgacgtggcttaaagatgtgtcctctttgagcttcctgcatcaggggtctggatgggaaaaatggatttactttctgtctccctgggcttgcagagtggggagcagagggaacaagatgtcagccctgcgatgttagctccccatccccagagcttaagaagggccactgagtcacacgggtggggtacttagcagacgggacactactgattccctctgggctggtagagatggcacataccacagaagttcaaagaagccatggctggtggagggaagtgtgaggatggagaggtttgcttggaagcagaaacaaagaacacacttcagatggtagacttcctctctccttgttcttctccttctctcctctctctcttcttcttctccccttctcccctcctgtcttcttttcaaacagggtcttaccatatagtccagnnnnnnnnnnnnnnnnnnnnccttccttcccaccgttggaattacaggccagttcacctgacaggttacctgtgactccttatgagatcagtcctccatcttctcctgctggaatggaggctgtgttggtgcaggggatgctcagagctctctacggccagcctcagtccttcaaattgcatccatcacagactaggctcgtcaccatctgcttgctacggacaacagcagcagcctgcgaagggtggcctccatgccttccgaggcaaggtcccacctcacccatgctcacagggggagcatttctgcatcagatctgttaattaagtgggaacatttctttcctggacaactttgatttgctgtgctactcagatctccccaaagcaggagctgacagctagagacgctcagacttaccatcacaccgatctctttaccaacactgtaggataggattgctcagtggaacccagtttggtaccatcctaatggggtagtatttttttgttctttgtttttttgttttttgttttggttcctacaatcctcatctagatgacaacctgaggttctcaggtacagaagagactcttggtggtgtgtagagatttaacagttttctaaaatatgcccattcccccaagaattcccagggcccgcctgcttcaccgccccctgctttgtcactggagttgtgggtgacagtgttccctgctcagcttcttccttgatagtcctcaccagggctgcaactgccctgtgaccccaccgatcccccaccatgaaaaggaagtgtcagggctgcccaggctgagggatgtggggccgagtagaagaggcaggcgtgtgtgggattttatctgtgttgctgcttaatggatcctgacaggggttgggggacccagagaggcctgtgacaggtgtcaggagagccacactgttctcaaggcagtgagcaacttcccttccctctctcctttctccccatccccctactttctgtgccttgtgtgtgtgtgtgtgcgcgcgcgtgcgcgcacgcatgcatgtgtgtggtggttagaggttagcattgggtgtcttcctccattgttcactgatactggagttgttcactatacctggagcttcctgtcaaggctaggctaggcagcggagccctgggatctgcctgtctcctctgcggcatgggcatcaaagctgtatcctgctgcacttggccttttagacacctgctggggatcgaactcaggtcctcctgcttgtatagcaagcactataccaacagagccacctccttgccctctaagaaatgtttttaaaatgtcctgtgatccagagggaggacaactgagctgcagaaggttctagcagctggtctagaccaagccagagttgcagttggaagtcatcggagaatccctttgaactctgcttgcctgggctcctctccagagcaggtctaagatttgagtctaagtaccaggagtttaaaatttgcttattcttaaatttttacttcatttaaagaaaaatcttgatacaggataactgtcccatgtgtgtgggatatgataggaaacatgtgaaagggctggagagatgggttggcagttaagagcactggctgctcttctggaggtcctggggttcaatttgcagcagcctcctgatagctcacaaccatctgtaatggatctgatgccctgttttggcacaaaggtgtaagtgcaatggaacactcatatgtaaaacaaacaaacaaacaaacaaatacatgaatcttaaaaaaaaaaaaaagcctggcaatggtggtgcacgcctttaatcccagcacttgggaggcaggcggatctctgagttccagaccagcctggtctacagagtgagctccaggacagccagggctacacagagaaaccctgtcttgaaaacaaacaaaaaatcaaaaaggaacatgtgtgcaatgtgtaaagcttagggcagtgtgacagacacctccattgtctcagacactggtcgtttctttgggctaggcacattcaaaatcctctctggtagctatttcaaaatacacaatgaattgggaaccacagctgcccagcaatggtatagaacattctacgttgttctccagccgcacgtctgtcccttcatccagcttttccagcttccctctgaacacccgctgggcttttgacggcatagttctagtgagagcggcttctgtgagaacagctttgtcctttgctcataggaggtggggggacctttggcttttggctctctgagggcatcaggtgtggaaagaccttctggacgattctgctctgtgtctggggctagaagcatgggactggaccatgtcacttgtgaccgtcaaggcagccagaggaaaatgctccttaaggctctgaatgtgaccattacctgctgtcttcctacccacacccaccagaatcctcaccttcaaacagacctaagtttaaaacatcactcaggctgggaagatgctcagcaccatcaggacccaaatttaaatcctcagcacctgtgtgtaagccagtcctggccaggagcgtctgttacccaggaatcagaggttgagataggcagatcttgaggctcgctgaacagtcaggttcagagagagatgctaccccaaaaattaagatgaagaatgattaaggaagatacccaacatcctgctctgtcttccacactaatgtgtgcacacatgtacatggataaatttacacatgtacctagatacatatacatgtgcacacacatgcacatacaatacaatatgcacatgaatgcacacacatacatacacatgcacacacatatacacatgcacatacatgcatgcacacatacactatacatacacatgcatgcacatacatgcacacacacatacacatacactcacacatatgtacacatgcacacatattgtacacacacacaccacacacacacacttcagatcttcctatattcactgtactctcaaaccacttgggattatgtttccacagggattccagcttagcaggtctcaggtcagcctgtgacgctaacatagccccagatgctgctggtcctggggctacccttagccattatctaaaataccaggaaaccagtgtgtttaatcctgaagtctagattgttacagagctcccaggcagtcaccacacagctctgtttgtttaacttaccccagtatttgctctgtgaagcacacggttccattgtccctggttttagaatcatggcagggagcggcttggctgtgaatatgggatgggtactagtgagtatggggctcagagttttgacccttcttggcagccacagcccaagatgtccaagcatgacctgatcatactaagtccaaattctccacatgtgtctatgtatgtatgtatatatgtgtgtgtatgtgtgtatatatgtatatatgagttgaatatatatgcatgcataaacatgtcatgaacgtatgcatatttgtatgtttgtatgtttatgtgtgtacatatgtctatgcatgtgtttatgtgtgcatgcatgtatatgtattcatgtgtacatgtgtttatgtatatatacatgcatatatgtgcatgcattgatatgtatatgcacgtatggacatgtgtttatgtgtatatgcatatgtgctcatatgtttatgcacatatacatgcatatatgcacatgtgtttatgtgtatatgcacatgtgggtatatgtgtgcacatatatatgcatttatgtatgtacacaagcatatgtatatgcacatgtgtttgtgtgtgtgtgttctcttagacaaagagcccctgtttaccttcaactatctttcttctggaactgccatttgtctttggggtggctgacagatccccctgcctcaacattcctggcttcagcactgtgttgggttgaggatggtggctcatgcctgtgaagccggtacttgacaggttgaggtgggaggattatgaggttgaggccaggctggcctgcatagcctggtctgtcttccaaactctagactgcgttcttcctactcagatcctagttgtttttgttgtccccgaggatgctggctggctgctgcggtatcagggcccagtgttctcacccacagcctctctcggggaataatagcgtcctttcccagctggctgtcgttagatcctcactttgtgacaggagagacagcgcgtgttttcagaagagcatcttgaaggatatgcttgtactttcaattctcgttaggaacctcgaaactcggaatgcgctacaatattattaaatatgttgaagggtccctgatttactgcagaaacaaggcttattatctccaagcctggttcctcggcgggggtggctgggaatatctcatctctctcaggaaggtgaagatggacaaaaattagcataatgaggacagccatgctaacacagtgacaataaccttcatcattattttggggaccattttctaagcatcttttgggggatggttctgtgaacttgctggtagattggcaggagctgtcctgagagattttgttttgctttgagacagggtctctcacttgcctgggggctcagccgtttgcccgatgtggctggccagagagcctgaggtatcttgcctgtctctgcctcctcagagctggggttacaggtgtacaccacggcaccagcatcttcacttatgccctggatcctcgtgcttgctcggtaagttagctagccactgggtcaggctctgaagaccacctagtgtgcctcataaggctgtatttctgccactgtagccaaaagtctggcatacagaatatgacaagcccagtccagaagtgctagtttgtatggaatgagggggtctgtcctggcaatgtgttatgaagagtatgccctggtgcagtgggaagagaactttgctggcctgtcttagataggagggggtagggggtgctgcagacgcagctctgccaccattcagcacctgcaactcatgttggttgcatggaatccttgtttccctgctgtgcccacttgtaaaatgctaacgaggctgagctggatctcatggactcgccatatgtactaaacctgagcttacagagttttaattaatggcttgcatttatttacgtgtgtgatcatgctatgctttcagtacggaggtccaagggctccttgagtccctaagttctctgcttctatcagataggttaaactcaggcctggcggcaagcacctttaccagttgagccatcttaccagccctttggtccttaagtatgagacagggtcttgctatgtacctcaggttagttttgaactcacgatcctcctgcacctgcccccagcactgggtatctactcttttaatgggctccttcatgtgagggtggtgagcacggagacgtgtgacaccttgtctgaaggtcatgatgtgctgttggaactcagatgtctctggctttgaactctacctctccacagagggctcctggctcagaaaggactgcagcttcctcccctgggtgcggctaatgaagggaaatcgggggctcttctccctctttgctttcatgctcaataaatcactctgacaagggcttgttattgcttaactccctacattgtttggcagtccccggagggagagcgggcatcctttttgtctgcaattgcttcaggaacgaaaatatttttgcgtgtggattaataatcatcagataggtcaggtaaacagcccataattaggaggtgtgggcgatttgtcaatccaggcttccgagtgcaattatcagtcagatggctctgagacccagcaatggcactgtccccaaagatcccattactcacagattactccctgggtgggaggtgtgtgtgtgtggggatgaatcttttttttttcagaaaattctatatgagtagtgacacccctctatcagatttggggtgcaagttaatatctccctccctcctgagcctcaaaattgggcctggagtgtggacaacctggatctcaaagacactggactggtttgggtaagttgtggaggtgatcggaggagcaggtaaactcttgccagctctttcccgcacctccagggtgccgccatttgccttcttccaggttgttgtcacatgacttcctctggggtgtcatcacatgacctgacttcccggggctactgtcatgtgactccctgcaggctgccatcgtgtgacttcctagttgtctcacacagagaagccaaggatagaccaaagaaacgcttgcatgtgtccatcagtgagcccgtgaggtcactgactttcttacaggagcctgggggagggtctgcttagtgacagaagaaaagcccgccccctgggtgatgcctggagatagcagcgtgtctagaacacacagcacaacttgtaggcatttccactgaagagtctccttgcgccccagctgctgcttatgattcataagacccagggaggggccctgagtcttgtcagttcccagagcctcatccctccctccccctctctctgttcctccctcccttcctccttccaggaggtatgttttaatctggagcacccagccacagtgttaccctccagtcaactggaagccagtatcatcacacccattttacagatgagacgtcgaggctggggagcacttgcaagcaagtggtagggagaccctactcactgacagcagcacatgcatggagctcaaaggacgactttcagtagtcagttttcttcatgcaccacctgcgtcacaggaaccaaactcaggccgtcaggttctgtggtcaatgccttgtcaatggaaccgtcacaccagaccacggctcctcattcacatcacagagcagagagacttcacacgtgtgactaatgacggctctgggagagggggctgcatgtaccttctaaggctggtggcagacagagagagagctttgggccatgtttgtctgagatatgagagtagaaggaccagaaccaagagggttgggtggcctttaaggctgagcagggcaagaagacaacttcctcagaccttctagaagaataccctgctggcacctgtgtgctgtaagtaagacccactctgagcttcagatagccagggtgtcacaaatgatagctcgaggcagaatgaaaccaactccgttgggattgcttgttacatagcagctggggatgcatacacttgtctgtggtgtccctggccagggaacggctcagctaactgctgtctgccaggctcacgttcagcaggtgtgtatcccagtctcatcctgccccttctcactcacttgtctttcagtatctcaaggggggggggtcttcctattagcccaggctagcctccaatgttagcccaggctagcctctaacatgtgaccctcctgcctctgtgtcctgagagctgagtgacaggtgtgtaccactatgctcagctctctcaccctgtccccaggggccagtttccctggcgagacaccctggtatgcatgggacacaccttaaatctcactaggggctccaacacgaatcaatgtcacagtaaagaattaagtggtttacccagagtgggcctctaactccctctgtggctcaggaagaccttgagcttgtcatcctcctgcctcacactcccaaatagctggagtaatgtgcttggattaccaggccctgtttattttactcttaaacacagcagctctcacttagctggttatcaacgggagagtacattagcattttttccacctgttcctaggattgcttgcttaacggctgacggtctgccaggctctttattactgcagggctggatatctttcctcactggatgcttttctttattttgcctgtttgagcatgcatccccccattccctaaccccccacccccgttccacctctgtagtgaaaaggatagagacgagctcttgggtcagattttgccttttccatctggcttggtcttgggtctcactcagcatgtatgaggcctgagattccgttctcaacaacctcactcccgaaagaaaacattgcctcacggttctgaaggctggggcattcaacacacatccatgacttgtatctgtgaggctctggcaaaggctcctgtgttacgtgtgaagggtgtggcacggagagatggaccaagcacgcaagcttgggtctccttccttctcaggaagccactaatcccatcatgtgacctcttgtgatactagtgactgccagtcagctttcattaccttaacaaatgccggggagaaaggacccttccatcatcaggcgctcctgattcttatagggctgtgtttcttttagagtcccagcaagacagcatgttgctgttggagcctgtgacaaagcagaaattactcacctctcagaaagcaaacatgaggagaagcaagtgggacaccataatctccatggagagtattcctgcgtgacctgaagacctctctttaggctccgccccttcgcccacctccaaacccatgggtctctggaaagggagatgtttaatgtccaaatcatagtccttccaaaggcctacctctgaataacatgattccagcagttagacttttggggcgcacatactggggctctgatgaaaccatccaagtgtggtaccgcaactcctgcatcatgccgcccttagggctagtcccttgggagggagggaactatgtggaccgtgacatttgtgttgtggaagtctacacacagcaggtctgccccactctgagatttttatcagtttaagagatttaattatttgcgggcctggagggatacttttaaagacacgattgttctttatctctgggcttcggggcacagagttctaaaaatagctttgcaagctcaggggatgggaagctggggcctcagcagcaagtagagaaccaggagaaggcggctgttgggtacctacttgcgtagagctccttccggtagagctagagtcaacgtgcctgggactgagatgttagaagctgacaggaagtcccaggatgtgatctctgacctccagggtcaaaggtctgatcgcaggtgtggtgggtttaccacagagggaagtggcttggggtcatttgggttggccattgggaccgtgagactgcagctggcaccatctttggggtaaatactcaccacagtggtcatgggtccccttgatccgtccccttaaactcatcctatgggctgccctctggcccatgggctctcaggttcttctccagcctgtcacatccttgggcatgttggctccgggttggacacttgttctttattcttttccttaattaactgtcactcattttccggtcgaagctcccggggatcttccccaggagacggtctccacttccgcacagtgacattgtgactagctaatgaaatctgggatttccagatttctgctgcctcctcttctgggtctagacagcctgtgttcaacaggaagagatcacactcagcttatgtcattttagatgtttcagtggttatattaaataaaaaaaaatccaactgacaagtgttcctatggccataaaaatacataacgggatgtgtcattttgaccattctgagcgaatacagaaacccgaagagcagacatgttgttgggaaatggtatctgctgcctctccctggaaattttccatcatcaaaaccagaaatcctttaaaattttttcttgctttttttttttttttgagacaggttctcatgtagcctaggctggcccccaatttactatgtagctgaggatagccccaaacctctgatccttctgcctctgctcctaagccctgggactccccgtgtgtgtccctacatccattgcaaattaaaacaccagtcccagatcagttctagccctgctcctgaggcagaacaaagtccattttgtacatttgactgtcctggatgctttggtcaagcttgtgctgtgttggtttgtgcccatgtcctttcctaaactcgatgtttgtttgtttgttttttcttaaaagaagctgtcatcattttggtgggatggggtatgtctgccacagcaggttctttcctttcacctttacccaggttcgaacctaggtcgctaggcttttgcagcaagcacctttacccactgagccgtttcactggcccagcaagttgttttccaaagtcaactgttttgtggtgtgtgccagaattttctttctttctggagcacacatgcgtgcctgtgcctgtgtgtgtgtgcatgtatagaaggcagaggtcaaactctgggattcaaacccagatctctggctccactgggctctgtgtccacctgaaagaccacctctgggtaggggctgaatctggggtctgctgtagaagaccggataaacaggtctgtcaaagtttatccaacggcgtccgtccgtcccgttcgagtcacccacatccctttctggctctgtgtggagacagtggagacactgatgtcctggctcacggagccacaaagactgctggggctgtctgtgtggggagactgagccgtgaggacaggcggtggccttgctgaagctgcgcggcagcgagcaggaggactgaggggtttggaaaccctctcccaaacgtcactcatctagagataaaaatagcgaaccttgaggcgcccgaggcgtctgatgttgccttcggctctctggaatccgcagacacaagcagctgaagaactaatataacgcctgtcactcaagggaggcagactgttgttagagtgacggaactttctggaattagccccgtctcagaggtcagcttttcccagtctgtctccgcctgctgttgggctttctcctgggcttctctcgggttctgggctgggcaggaagagtccttgcttatgctgctgttatgtccctgctctgaggctcatgtggtggcttgtcccaggagtgctgactgtggagaaaggtacagctgtcattaggatgtcagccgaaggaggcagaattaacatagacccattctaccttggatagcctcagcccgaggtgtgtcaaggctagcctcttgggaagtgtctgtcacaagtggacatttgtccatgcaaaggcttcctaccctgctttctcccttcattccttccttccttccttccttccttcctttttttttttttttttttttttggttttttgagacagggtttctctgtgtagccctggctgtcctggaactcactctgtagaccagactggcctcaaactcaaaaatcggcctgcctctgcctcttgagtgctgggattaaaggcgtgcgccaccacgcccggctctaacctactttcttcctaacttaaaaaaacaagtggcacaggcgttccctccccactgccagcgccccctacatttctgtgttctgcagtttcagtgacccacagtcaattgagaaaacatcctctgatcatccacaggttttgccttgtgcattgttctgagtagcatgggaaagccttgagctatcctgctctacctgtctggggcatggggagtcgatctgcgagatgagcccacattgcgtgtgctatccttctcttggttgcttggatgccctctcggctatccaatcagctctcggggcatcgatgatgcacgcattaccctctcatggatcatttagaaaccctatttcttgatccttggtgggcgtgtccaccctgtgtatgctaccctcccattcgttgttcacatgctctcttcgttcagatgctctccgctgtgggggtgctgtgctgcttttattcaagtaacggggttagaaccaaatgagccttattcccagagcataggtgtggtgaagttgatacagtgggtgtggcagtgagaagccatgaagcacttctgggaggcgaaaaggcaatgtaaggaaagcaaagagctcatgcgtggagcttgcaaggagtgacagttagatccagcacctctgtggaatggtgatggacaaggaggaagagaaggaggaggaggaaatctctgctgttgttgcccatagggcatggaagtccctgctgacattctgtgtgggtctatgtgtgtcagtggcccatgcagagcatggtcccacctaggacatctgtgtgggtcatggctcacatcctcaatgttagggagcaccccagcattagggagcacttcagcgtaagggagcacctcatccttagggagcatggtgtgtgtggatgacagaagcattgtgaccacttgaacccatggctccttagctgttcaaatcagttgtcaaagatctactggaacacgatcggacttatacatcaagacaaagtggtagaaatgatacacaaataaataaatatccataatgataactgcagctcctgcaggggtagcagggctggggtgggcgtgtcagcccagggaactcatcacaagcagggttctggccaatgtcagctcccaatacccagcagtaggaacacactaaagccagtggaaatgggggaagggttccaattttggatatttaatccttcgggctgagaggattgagtccgacgtggaggatatcatgactgagtgggattgatctcagccttggacaggggactcaactttcctcagagctttaacgtcctcagcaatgtgagaagattgtaacgagagtgtaataaagtaaggtagggggagagaaggaggcagggagggacctgggccatggtcaacactgggtgttttcagctgaggccattgatgcatgtgctttgctaaacacccgcatggctggcaatggtggtgacgacagtggtgatgatgctggtgatggaggtgatggtggtgatggagaaagtggtggtgatgatgggggaggtgatgatactgttgatgagggtggtaatggtgatgatggttatggtaaaatcagtagtaaagggatgggaaaagaatgagagcggctccatgcggctggtgggaatgaagaatgccatagccaaccaggaagatggtgtagcggtttctcgggaggttaaagagagttaccacctggcctagcaattccactcctactttacgctccaagtattggagacagatagccacacaataccggttcatgtgtgttcctcctggcacggtgaaagtcaacgtgacggtgtgccgtgtccatcggttgctgagcagagaaccaagctatgattccagtgttgacctcagccatgaaaaggaagcactcagccgtgctgctgtatgaataaaccacacagagtgaactagacactgacaccctgtgtggcatgatgacggggcagccctgtcattgtagctgctgagggcaggagaggaggggagaagacggtggttactggtgggggcaagccttacctctggggtctgatctcaccttgaacatgatgggcgtggccacggtaccacactgtgcacatcctaaatgccaaggagcatcacactttaaagccactctgtgcggctgtgtggttgatcacgtggctcagttggtaaattacccgctgtgtgagtatggatgtgtggattgtggcaggtggggtggagcccctcacctcatgtcagccaggaaggacgggcaggaagaggcaggggatgaggtatatctttcagggcactgcccagtgacccacttcgtccaatgaggccccatcttacgcagcttcacgggtacgttagcctatcctgatttaggatctgacagtggttggaactagccattgggaccaggaaaagtgatggaacagtcggtctcctcagcagttctcatttaatgaacttggcagctaataacacacacatacacacacacacacacacacacacacacacacacacacacatgcatcggtgggtgtagaggcctgtgagtggcatcggtggttgaatctagagtttgctgtttagttgagtctggctcactggtttgcttagggagtctggacagagtctctgcctccccagtgctgggactacactgaaatatcattcctagttggcttttatgtagattctgcaatcagattctgtgctggatagtttcagtcactgccttcgttagataggcctgtgaacatgtctgtggggcgttttcttaattaatgatcgatgtgttagggtccggcccactgtgggtagtgccatccctggacaagacatcctgggttagtggttatcaaccgctgtcctaggtggtataagaaagcaggctgagtgagccatgaggagcaagcctgaatgccacgttcctccctggtctttgctttcagttcctgcctccgggttcctgccttgacttccctctgtgatggtctgtgttggggatgtgtaagccaaataaaccctttcctccctaggttggtttggtttgatcacagcaactaaaagcaaggaaggacagacaggtcctggtgtctgtgagggcaagcaccttatccactgtgtcatctctgtggccccagaaaataattttacacagtatttatttattttttttttagtgtgtccatgtctgcgttgtcgctggtcacatgggaatgttcagccacagaattttccacttggtgcttcatggtggcaccagagacattttgaactttggagctttctgcagtttggatcagggatccagactgcttcactcataatcctgggagctgctgtttctagtcctctaactaaccctggagtctagaaaatatattttcaagccatggcaacagatcctgcttcctgcctgaaagtcagtgtgattaaaacaggcaagcactttaaaatagtcagggaagttccaagccccagtaagcggtcctggaatggtgggggcgaggcccgccagcccacaccttccccagctgcttcggaagggctgaggcccgtgtgtgatgctagctcccacatccagacttctaagctatgcatttgcctgtttatatggtttcaatggaaagggacaaagaaggcagacagtcgcctagactttctgaaatcattttctccctctcgaagggcttttatttctcctggtcccttatcagagaatgtcaaaggggggaaaaagagaaaaaaaaaaaaaaagaaaaaaaaaccttatgccttgaaaatgcctttaatcagtcctcagacctttcattttttaaaatctattcccttctccccgcccatgtcaagacttgaaataaaacgatttttccagaaacagatgacaggaggcaagggtgacgattaataacccgggagcctgtgccaccacacctgccctatttaaaatgaaaaattaccttttccccccttagactttattaaaaagaggatcagaaagggggggttgctgatagcacacagcccatcagccaggcgtctctgatgccttggcgctgcagagtcgacgttcctgtttgagcagcttgggtaagaaaatgaagctttgcacttcttggtacctgaacttctgattttgagcctgtgggtatggggaggaagcagattagccggggaagggaatgtggttggcatggtgggatatctttctttttatctctttaatttaattcaaggggagtgagtccctgaaaccagtggagtgtctgtttgtctgtccttggaggaagagtgggcgatgccccggccctctgggataccatgtggttaatgggaaaagtgaatgaaagcattggtctccacctttggtgggattttgatcaggtcctcttactcatctaaaacttgattaaacgggccagtgacccacctccaggaagacggggtaaccgatcccccaactctgagaccagccactgtctcccaaatgctgtttttcttcccatttgttattttcaaaaatatgtgtacctacctgtctgtgtgggtatgcgcacgtgagtgcaggtgccctcagaggccagcagagggcggcagaggccccaccctggggttggagttgcaggttgtgagcctcccatgtcggtgctgggaactgatcttgtgtctttcatagcagcaataacctgttttaaacactgagtcatctcttcgccccagcttccacccccatttgtttaagacaggaatatatatatagatgtttcttttggagacagggtctgtctgtgtagccctgactggcctgggactcacagagacctgccttcctccatgccgggattaaatgtgtgtgccaccacacttggcctgatgatatgtcagctttgatgacttccctctgtggttacacacatgggtctttcccctagatagccgtcctacgcgtcctagggatagaggtgctgtaagagaacacattagcacaagctcacacacttacggtttccagagcttagagtcaagcagcaaagcacagactcccgccactctgtgggttggatctcagcttctctcccttttcgcctgtacctgggtgtgtgtgtgtgtgtggtgatggacagtcttcacatcccttggcttgttgcttcatcccaccaggctctctctccatcttcacttcacttatgtgacctctctctactgaaataaaggtcagcgtgtagcttaggatgaccagatctgtgatgtttctgcctctgtctcctgggtgtctgggagggcaggtatgtgctgtcacgagtggctcctctccttctcatgagctatagctgattaggccttatctagaatgaactccgctcagtcctacctgcggggactttatttgcaagtagggtgttggggttaagatgccaacctgcaccctttggctcacatctctgtcctgaggttgaagtaaggccacatgctgccccacaagggtctgcatcttccagtctgctccgactcttctgatctgcctgtgttgtgctatccgcgcagcaagcgagggggaaatattggtgcaagggagaaatatgagttcgagagtggtctttacatctgttcaattcagctgttgtctgaggacctcagtccacattctttacggtgggttgccttggaaataggctctgttctttttgagaaagttctggaaggattcaaaagtaaatgatacaacaagccagcccttttcttagcacacctctgtcctggcccctatcccccacccctacctccccacccgcacccgtaccctcacccccacctccaacatcctcagactgggccacctgtctttactgttggcatggtgacccttcagccagctgacatgtggcctcctgggagatcacatcctgaggaggcctccttccctcccctttctcctctgacacccttccttccttccttccttccttccttccttccttccttccttccttccttcttgttcttttgagacagggtttctatgtgcagccttggctgccctggactggctttgtagaccaggctgctctcaaactcacagagatcttcctgcctctgcttcctgaattcagagattaaaggtgtgtgccaccatgctgggctcgctgtacagttttttaacagaactgttttctttggttttggatatctgggacagggacttgctatgttgcttgggctaactgaaggttttcgttgggctgcttgcggattcacttactgttgtaagacatcactgcaaagggaatctggaaggcttcgctcagtttttgttaatggctccatcttgtttgatggagtcacaaccacggtcctgggatggatacagtccagtgatcttgcccagatatgttcagtgttgagtgcacgcatgtgtgtgcgtgtgttctctgtgaggttgtggaatgcagttagggagtgagcctgtaacatcagtcctcttgtagtccccagagatccacaggatctctgtgcatggatacttggctccttgtgtagcagtgtcatgcccgtggtttgtatggaccatctgtcccctgctcaccattactgaacatcacaaactctgtttccctccctataaccatggggaaggccccaggaatgtgcctccttgtccgtcaagtctgtgtccattctgaagacaagctttaaggtcacctcttagagaagcatttcccttggcagtcttttaaagcaccctgacatgatgatacattgcctatggcgtgaaaaatgcacgaggtgtgaatgcactgtgagctacgtacaaggtcatcagcatgaagtctgaggtgcatttaaagtgctgtatacatggcctgaggcagcagggtgtgtgtgtgcacatagcaggaggtgtgtgcacaaagcaagaggtggtgtgtgcacacagtaggaggtgtgtgcccacagcacacagtaggtatacacacagtaggaggtgtgtgcacacagtaggaggtgtgtgcccacagcacacagtaggaggcgtgtgcccacagcacacagtacgaggtgtgtgcccacagcacatagtaggaggtgtgtgcacatagcaggaggtgtgtagcctgaggtgatgggatgtgcagacaaggtgcagaagatgcactgtgccgagtataggctgctgagacatgagatgcactcgatgtgattcacctgtggtaaggtgctgatggtggatctttgcctacagcgaccctaccccttcccctttccttacctgcatctctctgttcctttgttcctactcaggagggaatctctccaaacaagattggatcatccagtggcccaccacgggagccagggcaggagagcaaccctgtgtgccccccggagcccagcccgtggatccgaacccacctctcccagagccccagggtccagaccaagtgtccccagcacttctgtcctaccagccctacgcctgggacccctgtgtacacccaagtggacagactcactgtagatgcctacccgaacttgtgcccgccgccgccacccctggaatcaggccaccgctctctgcccccgtctccccggcagcggcacgtagtccgcaccccaaatattgtcaccaccgtgaccccacctggcacgccacccatgaggagaaaaaacaagctgaagcctcccgggacgccacccccctcctctcggaagctcatccatctgatccctggcttcacagcgctgcacaggagcaaatcccacgagttccagctcgggaaccgtgtagacgaggccaacacacccaagtgagtggggcccgtggatgctctggggtggctgaacccaaggagccacactcctctggggaagtcgggagcagacagtcttgtgtctgtcagtctagataaaggaaagcacggttgcaccgaggaaatgggttggatggaattttctagaacttccggtttctttttacccgatagcctttgatatttctggaggttggtaggcatattatgtcttggaactgaatctaagttgtggcccattttagtaggtaaaactcactggctgcccctttagcgttgccctggagtccttttgacgaacagtggtaggactgggtacagcccacggagtacatgcttatcctgtggatggaggcaggacagggttgctgggccctgcagggtcactttcctgctggccctagacagaggtcaaagttaccacgtgttagccttgaagtgtctggtaggcatagtaaaatgaattaaaaaaaaaaacaaggcatatgactcgtccaaaatagttaccattttaacgtagtgtcaatgtaaaatatggctattgaggcattcttggttctttatgaggtctttgaaatccaggttcctatgggtgacagtgggaggggatcattggaggtgggtagaaggcccccggggctgtggggcctgggcacagaactgagatgacataaaaaaatttaggaagggagtggcaccactcatgacctctgaaagtcagggactgtccgagtgacaccttcagtaagcagctttgaggggagaggtggggcctctccatagaggggataatgttcagccgtcaagggagagggacagttctaacatgatggggtctcataccagtaggcggaggggcagaggaagccagggggaaaaaagctcaaagctagagaggccaaggctgtggacagggagtagaaaggtggcagactggggcgagggagagggaaatgggttgccatgatccaactggaatagaatttgggatgagaaaatgtctctggtcccggtcagtgtcatttacataacctgtgaatgaatctcttgaagacctttgaggttacattcaaaacggcttaaagctgccaatcgtacgttttttgttgccacaaacaagagaacgaggatcctctcagccaggagtggagtgccagacagtaaacatggtaaatatttttggctgtgccggcggaatgggtttgtattgtcaaggctcaacaactaaagcagcctgactacggcaggtgagcagatgggcgggctgtgttccaatagaaccatctataaaaacagcttccagctggccttggctatggtctgtcttaagccatgctggggaggtggtctctcttctgaggggtggtggaggggagggtgaggtcagatgaagggtgttcccgcagctgggaacctggaggcggtccctcagaggctgaagcaaataaaagaggctcttctgatgagaattagataggatggtcacaatttcatgagagccacagagactgaggccaggagattatgaggatacaggggagagtcccaggaaggctaggtgtgaaattgccaggttggaaagtggtgagaggtctggggtcagtttctagacctatagcattagaaaaaaatattaaatttaattaaatttaaatataattagaattacatttaaattaagtattgatataattatatcatttcccccctccaaccctcccatgcatccttcctccttattctgtcttaagttcatggcatctatttctttaaaatatatatttatatcattaaattataattacataattatgtaaatcaaaatcaaattatatgtcacatattaaaatttaaaccaaaatatatttatatcactaagttgtaattatataattatataaattaacattaaattatattttatacattaaaatttaaattaaaatatatttataccattcagttataattatatatttatataaattaaaattaaattatatgttacctatattaaaattaaaataaaaatatatttatatcatttcctccctctaaccctcccatgcacccttccttcttactctctgccttaagatcatggtatctaattttgaaaatataatcataaatatataaatagagcctgctgaatccatacagcgttacttgtacagatatgttttcagagccgaccatttggtattggataaccaatcggtgtgctcgtccctggggaagactatgtctcccgttctcagcgttcctcagttgcttgtagttctttgtctagagctgggtccccacaagacctatggcattctctctgcatggttgggcttatgtgagaagtggcccctttgtgttctgagggttggcctatctccaggagagcttgactctagacacatctaatctgaccctccctcaaagtctttcagatggacacagtcatggtcaatggtgctggggttctacatcaggatgcaggaggcttaagttttgcctatgatggtcttctgtctgtgtcagtattgaggtcagttcttccttaagggaacaggtccctggccatcttcaggggcctcccagattcacctctaggtaataatggaggagaggagcgctgtggtcactaagttctaacaataagactgggggtgggggcagcccctacttagcatgttccaagtagtctggacttcctccaggaagtagccttgggaccctggctttgaccctggggaggctcagctcgcctgagttggttgaccaaagagcttgaaatatgttcctgcttttaagtctgaggttatgagccattagcagatgatggtatcaatttaatgggctgtgaccagcattggaaagaagagattgatggacttagaggagaatattttgggaaacatggtgtggtgaaggaagttgctctgtgggacttgttcacacccatgaacacatacacatgtgtacacatatacaaattaatgtgcacacatatacacacatgcacatatacatgtatgcacacatatgcacaaatatatatatatatacatacacagataaatacacacatgtatgtacacacatatgtacatatacacaaacacatatacacatatgacatacacattgaacatatgcatatacacatatacatgcatgcacaaacacatatgcacatgtatgcacacacatagacacacaaacacatatatactagccttaaatacactttttctgttttgttttccccattgagaactcttactactctagacagctttgattttagattgatctctacaggaagtagttgagaggacatacatcttcccctgtgtctgactccgcccttcatccctgctgggcatactcccatgggaacttggcagcctgtcgtccactttatgtcttcttaatggtggtgaggcagagcaatggaggtcacataggtctttcagaagacaacggaagcttcccgaactgctgagtcccgtgtcatttcaagtgtgtaccctgggaggcttttgatctcatcaagaccactttgactttttcatccttggcacacgagcagtgtgtatcacgtggtctgggtgggtctaagtcctgtcccctggaagtctctttacagaagagcagtcagaaagcaagaaaacagggctgaggatgtaactcactgggtagggccttactaacatggatgaggctgtggcttcgttctggggactgcatggtatatatcggattgtagtgacaggtatctgacaccccagcacttggggtagaggcaggaggatcaggagttcaataaaagccatcctaggctacatagtgaatttgaggccagcctgcannnnnnnnnnnnnnnnnnnnnnnnnnnnnnnnnnnnnnnnnnnnnnnnnnnnnnnnnnnnnnnnnnnnnnnnnnnnnnnnnnnnnnnnnnnnnnnnnnnnnnnnnnnnnnnnnnnnnnnnnnnnnnnnnnnnnnnnnnnnnnnnnnnnnnnnnnnnnnnnnnnnnnnnnnnnnnnnnnnnnnnnnnnnnnnnnnnnnnnnnnnnnnnnnnnnnnnnnnnnnnnnnnnnnnnnnnnnnnnnnnnnnnnnnnnnnnnnnnnnnnnnnnnnnnnnnnnnnnnnnnnnnnnnnnnnnnnnnnnnnnnnnnnnnnnnnnnnnnnnnnnnnnnnnnnnnnnnnnnnnnnnnnnnnnnnnnnnnnnnnnnnnnnnnnnnnnnnnnnnnnnnnnnnnnnnnnnnnnnnnnnnnnnnnnnnnnnnnnnnnnnnnnnnnnnnnnnnnnnnnnnnnnnnnnnnnnnnnnnnnnnnnnnnnnnnnnnnnnnnnnnnnnnnnnnnnnnnnnnnnnnnnnnnnnnnnnnnnnnnnnnnnnnnnnnnnnnnnnnnnnnnnnnnnnnnnnnnnnnnnnnnnnnnnnnnnnnnnnnnnnnnnnnnnnnnnnnnnnnnnnnnnnnnnnnnnnnnnnnnnntccctccctccctcccttctttctttctttctttctttctttctttctttctttctttctttctttctttctttctttctccttccttccttccttccttcctttcttttctttctttccttctttcttttcttctctctttctatttctctttcttcctctctctctttctttcttcctctttctctctttcttccccttccttccttccttccttccttccttccttccttccttccttccctccttccttccttcattctttgctctatttggcattcccaaagatacagcagtgtgaaaaggaggctttgttcaccaaaaggaatgttgggtactgaggaagcctcaaaggtctggaaagtgtataaaagaggataggacatgttggtgcatatgtacatgtgcacatgtgtgtgtatatgtgcacacatgcaccacagcatgtatgtggaggttagaagacagctttctttcttttggcagtcagtctttctttccactacatgtatcttggggatggtggtgagcaacccactttcagggttgagctgttgcttctgcacaacaagatcttgctctcttgtccttgaaacaactaaggtggagagggatagaggaagaaacctctacccctgcctcttatgcacttacacagacataaatgaatacatacacacatatgagcacacagtgaacaaatacacacgcatgaagacacacacatgaatacatagacatgggagcacacacataaacacacacgaacacaaacataaacacatatatgaacacatatgaatacacacgcacatatgagcacacagtgaacacatatacacatgaagacatacacatgaatacatagacatgggagcacacacatgaacacaaacatgaatacatatatatgagcacatatgaatacatacacacatggacacatacatgaacacatacacatatgagcacacaaacacacacatgaacacacacatgaacacacatatgaatacatagacataagcacacacacgaacacatatacacatgaacacacacacatgaacacatatacatatgagcacacctgaagacatacatgctcttaaacacacacatgaacacatacatgaacacatacatgaacacatacatacatgtgaacacatacgtgaacacacacacataaacatccacatgaacacatacatgaacacatacatgagcacacacatatgcatacacacatatgaattctattataagcttttgtttccaaatccttttaaaagataacttcagctatgattttaattagctaattcccagctacacccatatttagaagctatagctgcataaaacacaagcaaggaaagataacagcacctccacctctggtcattgggaaccacagtaactacggttaatactgtaattggcatcctgtaggcatctatttgcgtttatagtcatgtgacaccagctttcctttctcatggctggagctgcttctcccttaccagtatgactcactgtactcatgcatgaatatgaatagtccactcacgaccaaaatgtttactctcctctctctctctctctctctctctctctcttgctctctctctctctttctctctctctctctgtctctctctctgtatgtgtgcttgtgtgtgtgtgtgtgcatgaggcatatatatgtgtgtgtgggggtatgtgtggttcatgtgcacatgtatgtgtgtgctcatgaacccatgtgtgcacacagaggccagaagaagagattggatggcttgcactgttaatctttgtcacatgccctttggtatggggtctctcattctgtctgaggtcagcccatgagccttggagagcttccttgtctctctctgctagggcattggatcacacggccactcctcctttttgtgatgggggctggggatttgaacgcaggtcttcatgctcgctcaacagccatcttagccactgaatcatctctgcagccctgtttctcctagaagccctcttgtctcccccaaatcacattctagaatattcttgatgcttgcctcaacttttaaaccttgtgttgtttctgtggggcccgatgtctcaaagcctttactggcccgagaggagagaaccaggctgcataggatccaaaaatatctatctattttgcttgtgtttgaaccctgagctcttctatccagccaattctgattttatgccgggtctgggctgtatcgtttgtagttggaaagagaacaggcctggctgaacagattcattatgtaaatttgatttcaggagagatctttttgtctattttagaaaactaattatgtgcaagtatttaaagtcattgacacatacctacagatcattgtgctaattatgacaaggcaggctgatgtcagaggaaggtacagacgagcagtgagcacacagatagcagagaagccattaaactggaaagagccctcccttcctggttccatttcctttcaagtttgccccagaatgacccaggaggttcagagccactgcaggtattgcttctgtggcccccaaagcagggggcagtacagagtcaagagaaccatgttaaacaggttccagacctgtcctggtctccaggggatattggcttttgtgatgactcccagggactcagagctgtgggtccttcccacaggtttaaaattcaacctgagtcgtcctagtccccacacatggatcagaggcagtctaccctaagcagggccgcctgctcacagacacatagcctccttagcggtggtcagaggacccaggaagcagctcagggaggggctaggctcactttactggaggcttctctggaaactcttgtcctgtggagttgctgctaaattcctgttaaattcctatacttccctccctccctctcnnnnnnnnnnnnnnnnnnnntctctccttccctctctcccaccttccctccctccttccttcccattttctttcccctctttcccctctttccatcttctcctctttctctcctattttcacccccaaagtactggggatcaaacccatggcctcattcatggtgacaaatgaggaagcacagaatttcttacttccaatcaatggtgtcttccatagaacctctgataaaaattttattttaggtttggaatatatatcctatccagttgcttcttacaagtttttttgtttgtttgtttgttttttggtgttttacatattgttgttcatttctcccccgccccccaaaatctttttgttattattccgcgtaagggagttctggatcctgcttctttctctttcagcattattaattgcccctttctcaatcccaggccccagactctactttgaagaaatgagacattcagggatgaaattagtaccatcaggtgaatcgatatggaaatcagattcaggtgaatcgatatggaaatcagatttggaagtcgacagagacgcctacaagtctttggctgtcaccttggtctctgtctgaagaggcacctgcagaccgggcagccatgggtggagctgtggattttctgtgttgatgcaatgattcagacccagggacttggccacgctaggcacccattctagcacagccccccttcctcatgtaggtgtggatttccacccatgctccttcagtttggttagaaaacctccctgcttgatcttggagatacaggaagttaaggctgaggttgacgtcatggagaagacgatgccaggttccagccggctgtggcttttgtcccctccataggaaggatgtgcagagtggctgatgacacccaccggccagcagtgctgagtcttgtacctagaacaggtgtgtgtgtgtatgtttgtgtgtttgtgtgtgtgtgtgtgattgtaagtccaacctaacaggcactgagcacacagtgtaagtatagacatgccacatgatgtagctgacagatttttacagccagcaggagacccagtcggtggcacaagtcgaatgtgtcctgcatccatgatgctttgatctgaggggtttcagactttgaaattttccgatttctcatatgcgcagcgagatctctcagaggacccaagtctaaaaatgaaatccttttgtgtcttatttgccccctgtaaggacacagcttgaaggtaattctatacctcatttctttattttactttatttgtatgactgtgtgcctgtgtgtaggtgtaggacagataaccttgatgcggctcctcaggtattgtctgccttttttgaggcagggtctctcaccaagtcacaatccctggtcagtgagggccagggttccacctatagctgcctcccctgctataagcatgtggcaccatgcctgatggtatttctttctttattattattattattatttttgagtgtaggttctggggattgaccctgggtcctcaagcttgtaaggtgaccactttatggccttagctgtcaccccagtcctttacaccatatgcctatgagacaaagtttgcatgccctgaaggatcatacccatggtgtcatggtgaatgctccaagactcttggatgtgggacaatccgacatcctggatgctcggttgcttgtaaaaccacattgcattgggatagaattcccacgcgtgaaatcagcccaaggctggttaagggagctgacacagtgtgagtagctgggttaccagggtctgatgatattggcaggaaagaggtctgtgtgttcagtactggcttnnnnnnnnnnnnnnnnnnnnaaagaaagaaaggaagaaaggaaggaagaaagaaaggaagagcagaagagtgggcaagaacggtccttaaactatttaggtgtatttagtgatgggtgtgttggtgcctgcctataattttggcattcagaaccctgaggcagaaggattgtcctaagctggaggtcgacctgtgctatattgtgagttcaaggacagcctgagctacaaagtgaaactgtctcaaaacaccaaagccagggctgcggatatggatcagtggtaccaacactctctgcagaggcgtgggggcctgagttctgagccctgtgcccacagaaaaggtggggtctggctgctgcacctggtatccaagtgctatgtgagacaggcagatggctagggcttgatggcttccagcctagccccagattaagagagagacctgtatcaaaggagttaaggctgagagtgatgtaacaggacacttaccatcctgggtatcagtacttatcaacacacacgcaaacacacacagacacactcatgctcttacacacacacacatactcacatatactcacacacatgctgacacacactcacacacagatacacactcacacacatgctcacacattcacacactcccacagattcacactcacgctcacagacacactcacacacatgcacatacactcacacacacagacacatatttacacacacactttcacacacaggcatacacacacacacacactcgtgctcacacacccacactcatacacactcagacacacgcacagacacacatatctacagatacacagtcacacatgcatatacattcatatacactcacacacattcacatataaactcacacagacatatgtttgcacacactttcacacacaggcacacacacactcatgctcacacactcacactcatacacgcaatcaagcacactcaaacacacatatacagatacacagtcactcacacacatactctctctctctctctctctctctctctcactctctctctctcttccacacacacacacacacacacacactcacacacacacacacacacgcacacgcacacacacacacacacacacacacacacacacgtttctacccagtcttagctgacacttgaggtaccctgtgtgataatggcgctgggactgtcttatggagaagccctttccccccagatcacccccacactaatcctatgggctctgctgctcacgtggacccagagctgatgaacacccctggagcaaggggttcgtgtgcttgaggatgagtctcgggactgaagttctgagatacagaggctcagcggtgtacaacaaagtgttgctgccctggagggcttcatttgtcggtaggatttatggcttccttttatcttgctctgtggtaatcggttgagtttttctcctttctctgctcagccagcagtgcctgccttctgggaggaaatgtcacttgcttgccaaattaaaagccaggaatctgttcactgtaggctgggagagagtctctgctccgtatctggttctccgacctatttaataggctctgaaacgaaccttttagtataatagatgggggcatcagaattccttccaaggccagctttcccctcgtgcctggctcccagatggcacaatgtatcacagagggcagctgcctgaggctttgatttaagatggtgggtaacagatagtagggtagggtggaatggttacattgaggcagatgagaccatggctggggacagctagcatcctcaaagtatatgcagaaattggaggccgtggaggtggagccaccccgggtcaagggtgtggcctcagctgccagacacaggcagccacataacagtgaagatcaacctcatgaaggggacatgggtgtgtgtattggatgagaggacaatcaattctgggtctgtcctaggatgggatcaggaccaccacatcccagacagaagctggagtacttgtcttgttgctgcggcaaggtatctgacacgggcagcttaaggaaagggagttgctttggttcgcagtttgaaagcccacagttcattgctatggcattgccatagcagcgggggtgtgatgcagctggcctccacctaggaagcagagagggatgaatgcagctcagctcacagactcccatggtactacattgatggactgagcaaactacaagatagctggagagatggttcagtggttaagagcactgactgctcttccagaggtcctgagttcaaatcccagcaaccacctggtggttcacacccatccgtagtgggatctgatgccctcttctggtgtgtcagaagacaactacagtgtactcctatacataaaataaatatatctaaaaaaaaagatggcaccactcacatttaaaactggtcagcagggtgcctcacaggtgactctaggtcctgtcaaagtgagagtgtcacagaaggctgtctgcttgggactctctcacacatacatgtacacgtggcatgtttcagagtgcctgggtgatgccatgccccagaaaggcttctctggtgagcacctgagccctgtttcccaggtgctgacaacggagcctagaattagccagtctcctgagaaagttgccagcaatgcgggttagttcagttttacttaatgctgtcgttgggttgtccagtattaagacagttgtttgttttctcactcttcctgtctgcctgtatgtcttctgactgtctctatctatctgtctgtctgtctgtctatctatctacctacctacctacctacctacctacctatgtatcactatatatgtacacacacatgtatatgttaacatatatgtatatgcttggcctcctagaagggttctctgtaaggagggctatcacctgtcatgcatgacctgtgagttgtcagaggtctctgtaagagtccagggaatacagattaaaaaaaaacaacaaccccacaaactttgtttttaatatgttgttgttgttgtgtgtgtgacagggtaggcagagatcatgttttgttgtgtgtgtatgtgtgtgtatgtttgtgcatgtgtgtgtgacagggtaggcagagatcatgtgttgttgttattggtgtgtgtgtatgagtgtgtgcatgtgtgtgctcgtgtgtgtgacagggtaggcagaggtcattatcaggtgacgtcccctttgcttgctatctcacttttggagacagggtgtcccactgaactggctacactgattgaccagcgagttcccgggaattgatctgctgtctgctttcgttccttcacccatctctgggctgcatctggatgctaccacctggctgcttacctgggcgctggtgctcactcatgtttgcacactctgctgagccatcttcttggtgacctaaactctttctttaagaggatcgtgacctagaagagacagagaaatcatcaggcataattcagtggagaaagactggtaggggaaacaaatctagacgatactcatttaagactggttttttttttttttttttttctttttcctttgagccagtaacagcttcccagagaactgtcctctaacacaggggcctgcagacagttctgtaaggagctagggggtaaaggtatcaggctttctgcatctctctggtctccactggggtcattctaactctgctagttgagaagaaaagcaaccatggacagtatgcaaatgatgggtatgggcacattccaataaagttttatttataagaacaaggggtgggccagattggccctttgacttgaagtttgtctatgcctaatctgagaggagaggggttcaggtaaagaaaggagggcatacccaggcaggagagtgggaggtgctagtgcctggaactagggtcactttggaaagtgactagtgtgtgtgtgtgtgtgtgtgtgtgtgtgtgtgtgtgtgtgtgtgagagagagagagagagagagacagagacagagacagagagagacagagagagacagagagagacagagacagaaaggagggagggaaggagagagagaaacagagagaatcagagagagagagagagagagagagagagatggccagagggttaagtaagatcccaggtttactctgagtcactcagtagggaactttctagaagggctctctgtgaggagggccatcacttgtcatgcatgcttttagctgtactacattttgacctccagactttggtctagctactcagaatgctttccttcctctttgtcattaattaattcttgcaggtatgccccgagcttcccagaacaccacacacacagcagtgtggttctggtggcaaggctgagcggaagccaacgggaggcatggccatctgcttctggtggctgctgaccgagaacagagccacagaccctcttccagtaccagacacctccaagggccaggtgacagctcctgatgggtggcttaggcctgtgccatttaaacccaatgtggccggaaactttctggttgttcataatgagccctgtcccacccccactcctgttccctgtaggctggaggtattcattaactcaaattaatagaggaagatgtaaacccgttaacaaccctctggacctccagacaggccctgctccatcatgattctgggaagcttttcttaagggaccagccaatcaatggatttcaggaggcagatgcgtagctgtcctttctagacccagtgttgtctttgggatcatcttttggacatcaggaaggcggcctctgtgagtggccatggttcccctttcaggaggccaaccccacaactttctgcctgtatattctaatatcagagaccagacagttgatatcagaagtagccagtgtttacagctccgtgtgttctagcattgccctgcatcagtccacaaggcaggtttgtcagcatctctttttaagagatggttcttgcctccttgcccagaaaggtaccagaggatcaaacctttcgacacagcttggagtctatagatgaaggctcaggaagtatttaatggatgaatgaatgaatgaatgaatgatttccccaggttcgcagcatagaacaactaagaaaaccagcttcatgttgagatcttattcctcagctccctcaaggcagggtcatccctgacagagcacacttccgtttcttctagccttgatcctgcagggtagggtaatgtgagagccagtggctgaaaacatccgtcactgttcactttaagtttaatgtctgtggctgtgacactctaacacagagcatcgtaagggaggaaaaggtttattcagcttacaatgccaggtcccaagtcatcgttggaagcaagtcaaaatgggaactcaggcatccagtcacatcccatctgcagtcaagagcagagagaaaggaacccacccatgctgcctgcttccttaaatggttcaggattaccggcctagggaatggcgttgcccacagtgggccgggatggatccacccatctcaatggacagttaagacattccctcacagacatgcccacagtccaacatgatctcaacaattctctagttaaggttttcttctcagggcatgctggtttctgaccagttgttttgcttgtttttttttttttttttttgttttgttttgttttgtttttgttttgttttgttttgttttgttttcggttttctttgcagtcgggagtgagaacacttctacactgttgttgtaggcaacctctgttctaatgcatccaaagatgcatctccctatagctgccataacaaacgtgcgggttaagaggcgctcgcatgagtctattctcgcaaaggctacaatgccattggtaccgggctgtgggtgtcagaaaggctgtagagtatatttgctgttgctaaaaatgatgccatgcttatgacttattttggtatttgagaaacctttctgtgctcattaaagaaccccgctccccagcaacaatttgaagtggagctgctagttgcatggtgctaaaggaaagcagcctgtcccagttcctaatacacatgcgcggtcccagctggcgtacccattcctaatacgcatgcgccatctccagtttttctgtgagcctgcaccaagagctgggtgaggttgagttcatggtggtctacgctgcacacttgctatagttgcttgccacggctggtccatgaggtagaggccacctgaagacctaaggttgccaccgccctgcaaggctcctctgagtctgtcacccccagctcaggtcccagctagaagcatcatacaaaatgtgagctgagtctagactgagagagccaagggtctccaaagccgttatcctcgcttggcggatctcgcaggatgctcatgccagagcactgttccgatttagtctcagctgcccacttaagttttcgtgattcttcctaatatgcgaagaatcttggggcttggcgagccgcaggggcctctcggaagttaatgtcccgttccaggttgtgatggactgcagctggggtatctgcctgggggccaatttactatgagcagcctggcaaatttggcctccagtgaagaatttgagagtttacttaatcatagcaagctcaatgtattaaagtggcaagacttgccagaggtggggcctcgtggcatcacctttgcttttgcatccttcccatagtcactctgttgctgcattttctgcctcattcctacaggagagggacacatgtacccattggctcctctcttcaacttctgtatttacagttttgaaaactgagctcccgtttttatacaaaacccaaccaaacacaccatagggctggcggcctggtgagctggctcagtcagtaaaggtgattgattgcctctaaacctgaggagccaactttgattcttgggagactcatatggtagaaggagagaactaactctcacaggttatcctctgaccccctgcacaatagaggctacagtaggatttggggtaactccctttaccactctctggatccctctgtctcctccccaatgctggagttccaggcacagtctgtgtatgtgagggctgaagatttgaactcaggtctctaagcttatatagcaggcacccttacccactgagccatctccctggccctaggttgagtgagttttgataacttatgttccctggtacccataaccacagacaagataaggagcatgtcttactcactctagaaagttctttcatgcccgtctcccaccatcatacccactgaaaagcaacaacagttctgattcctatcttacaaattagatttcttccgggattccctgtcaatggaggcatgaaatatgctcactttgctgtctcacttcttttgggagacacctttccctcagatgctgccactgggactcacctctgtgtggcgcagggtctctctgtcatgtgtgagcaattggcagttcattgctgtgcaacagtaatttaccagttctccgcgtgtctgtcatttccccggttccatacaatggagcactggcagacagcgcggtttgttgacttacagacccgaggttagaaaccgccaaatcaaagtgttcactgagccatgagcccccggaagcttctagaccgattcctttcttgtctctttgtgatcgctgcggttgcaggcgatccttggcttttggcacagagccatagtgttgaaagtcagcgtctctcttcatgaagttagcaggctcctctatcatgaaggcaccagctgaaagatcaggctgtctctaatccagcttgactttattttaacatgtcccccatctacaaaggcctcaacttgttaactaaggtcacactaatggggactgggggttagaatgccattgtgtgtatgtgtgtgtaactgccaggcatccttctatgaatttaagccactccccaagacccaagtgtgtgtgaaacatatgagtgtgtgtgtgtgtgtatatatatatatatatatatacatatatgtatgattatatgtctgcatgtacatatatgtgcatacttgccccagtacacctgtggatggcagaacaggggacatcttgtgagaatcagttccctccctctgccatgtagatcccagacatggagctgaggtcctcaggctgggtggctgtgcccactgaaccgtctcactggctcatatccttctgtcagaatgtgaatcacccacgcatccttttgtctctttttaattgggatgtttacattgtagttactgggttgtgtgtcctatgtcagagatatggacattctctactcccccccccctacccccagtcattagctttctttcctctaattaattgtctctcaaagagatgaagtttgcatctcgatggagtctgggttataaattccttttctctcatcatacatggcgccttccgtttcttaagaagccagccaagcccaaccttgtcaatgcagtctccattttcttctcgatgctttgtagttttagtgtctgagatgggcttatgaccaagctcacattaatctttgcatacagtaaatcaaggcgtggaggctcacaagcccacaagctcatgaacgcaccactgggtcatctagaatcttcgtcaagtgtgaattggctataggcatgtggacatcttgcagtagtctgatttttctgtgtgccggtccatctgtacgtacgtctgcgtacatgactggcaaagctactctgcccctctctaccttcccatctttccatccaccacctctctccctcttctctccctccctggggtgagtataggctcatctcgtaatcctacattcctttctgttgctgtgataaagcattctgttcaaaaacagctctggggaggaagagtttatttgacttatacttctgtgtctcggtgtgtcattaaggttaatctgggcatgaactaaagcaggggccatagagggatgctgcttactggcttgctccccatagcttgctcaacctgctttcttcttatagaacccaggatcaccagcccagagatggtcctgcccacagtgggtgggaccttcccacatcaatcatccatccagaagttaccctgcaggcttgcctacaggccggtctgatagagtcagttctttaagtgagttttgacttcttcccagataggcctagagttgtgtcaagttgacaaccaaccagcacactccttaatgacagtgctcacacaaccttagcagtttgtcaaagccagggcgtgggcatcgtgtgcatgctgtcaccacagggcagacgttttcagatttcggtgattagaatatttctccatgcattgtcttaaaagaaccaaactcgaacagtttattacttaaaagaggacatgagctgttaaagaaagctttgggtggggnnnnnnnnnnnnnnnnnnnnagagagagagagagagagagagagagagagaagggagggagggagagagagagagagagagagagagagagagcgagagagagagagagagagagagcgagcaagctgggatggaatcctgcctctctgttggactgaatgatttcttcttcgctcttatttttaagagtatagaattacatttatttatgtatttatttacttatttatgcatagtgttggggtatgggtatgtttgccacagaatgtacgtgggccagaggacaacttttaggagctggttctctcctcctactgtgtgggtcctgggcatggccttgaactccagttgttaggctgggtggcaagcctcctttccccacagagccatctctctctctctctctctctccaagaatatcctggctgagttaggccatcagtctcatacccccctcttgcctgtgactctagcgacaagactcctagtctttctacagtctacaggaaaaggtcgtgtttcttcttggctaatgagtgactcatcgagccagcactgacggctcgccaacagccatccctcagagggaacagagcctacccttctctctgctgatgcctcccatccattcttggcatgctcctgagcatctggctggtgatgcctatcacgtctctgccttgcagaccacctgtctgtttgacatggctcacgagagcatccagtaggcaggagttggtgtggtgggggtagtaagtatgtttactgctctggttctagagagatgtgtgttataagctttcagcaacacagccagcccagagcctcctagcttttcaagaccaaatgaaatgacattgttcagggtatcatgattcacagccgatccggtttctacacttgcatggaagatgggtgatgtcgtaatacctctaacatcccagtttccaaggtgactacttatttctcctggttagctccagctgccaacttgacccagcccagaattatctgagcgaatctcatttgaggaattgcctccatcaagtggcctctgggcacgtctgtaggggcattttcttgattcttgcttgatgtgggagcccactgtgggtggtgccatccctaggcaggtcgtcctgggctgtataagaaggctagctagctgtcagtccaggatgagccagtaagtagctcaagatccttacttcaagaatcctcctgccttggagttcctgacttgacttttgtcagggatggagtgtgacccgggaatgtacagtgaatgaaccttgtttcctccaaaaactgctttcagtcatgaagcttatcacagcaacagaaagccaacacaggcaggtttggtagacttgagactctagtctcacccaccaaatgcatcatgctatatatcttggaatgaaatagatatgaaaggaagtctgagttccttacatagtcatatttgggtttttttctacaagtcctcgtccaacagtgtgggtacaccataaggaacgctgtttttcacaagctcaaagaaccttattgggcttcagtaactcttgtcttgagacagggcctcatgatgtagctcagggtagctcctcctaccatagtcctcctgggggagagtctgtggagggtgctgacgtgcctgcttcccacgaatggtttctttctttctttctttgggttgtctttcttgtttgttttgaggcagagtctctctatgcagccctggctggccaggaactcacagtatagaccaggctagcctatttctcagagaggacttgtgggtactgggatgatagctgtggtaccatgtctggctgctgtttctcaactggcctttattgtgaaacactttgagatgcataaaatgttatagcacagagtttcctacgttcctttcagctagtcatccccggctcagcactgcccaggaaggcttctaccttattgtaacactgtcaaagccaggatattgacatgtgcagcatattgatacaggcccaggttttattgggatttcaataaaattttacatgttacatgcattaacatttttattgaaggtgacacgcatcattaaggaaagcttaggtggggggaaagatctggattcaaatcccaggcttgccacttattgggtggcctgtgaataactcacttgacctttgtggccccccagtctcttcatctgtagagataatatttggcccacggggctattgtgagactttatttatttacttaattatgtgtatgaagggctgtatataaacctggcatgttgtatgagcaaactcaagagaacaaccaaaggcattgttcctcaggtgccatctacagatttttttttgaggcaggctggaccttgccatgtagggccaacaatctcccagggccctcctgtctccatcttctgtgctgagatcacagatggccacgctttgccaggctttgtacatggattcttgaggttgaatttagacctcgagctttttcaacattgagccctctccccagcccccttccacaagaccccaataacatatggaggcatccatcgcttggcaatgcagtgataggcctgttgttcaagcctcaacatggggaagctgatgcgatgacgaatgtcctcttcctactgaagggcaggtcagatggattctcccctgtgtgttggtcacatggacctctgccaggcttcctggtgctgctgggggtttgtcctggttcttcttttgggctgacttctgtacacacagcaagcatggctttcttctgctgtctgcatgctcatcctgctcaccattagggctaccatcttcgcagcccatcatagaggtagcccattcctggccactccacagatggccttggcctctttgctggtagaattttgaatacacacatctcccaccatctttacatcccatgcttttgcttctggaacttgagacactgctccacactctttaagagaacaaggcctgggatagagggagaaacccccaattccacagactccccacttctgtgttctctgagtgcattcaggcactgtttgtctaccagatcctactggtggcaacatctagaactttgctgtccaatacagttgctggcagctgcgaggtggtcattagtttacaattaaactaactcagattaaccctgagtacgcctttgatcacacaatgcactggccaaatttcctacagtgactcccacattgaacagccctggcacacagcatcctccatcactgcaggaagttttggagtgtttctggtccagatggtgcctgtgtttatctctcctgagaattctcccatccatggtgggtagtgatgctgtggtttggccatactccagtaggtgcctacttaggaaaccgagtatctgttgccctggatagcgggcatctctggggataggtgcatgctcattttgttaatctgggggccctcagaaggttaacgtgaccatatataaatatctgatttttagtatttaaaaagattaatgtggggttctagaaaagggctttgtcagtcaagaagggaagatggctatgaacagatgtgccagggacaaagcacccatagttttcaagatggttttacaaaggcaactgagcccccaagattacaacagctatgggtctggggacctttgtggtgtttggaacatttaagcaatgacgctccttcctccttggaagaggactagattgcaatactgaccctggcaggccttgcttgagtgggtgtgatctgtccatgataccactccaagacagtgcttcttacagcttgctgggatctgaaggaaaatgaggaaggagagggtttacgtcttcatcttcctcttcctccccagacagagtctcatgcatcctgggccttgaactagctatgcagaggatgaccttgaactctcatcctctttgcctttacccctgagcgcggggattttgggcatgctccaccacaccagttttatacagtgctggggacccaatccaggggttcgtatatgctcagcaagcattctacctccaactcaggctccaccaattcaggtctttctagaagattccaaacaagttgctcccttttgccacagcagagtgactaagacagtggttctcaatcttcctaaggctgcaaccctttaataatgagctgacctcccccaaccataaaattatttttattgctacttcataactgtaattttgctactgttagtgaatcgtaatgtaaatattttttggagacatggatttgccagatgggtggtgacccaccggttgagaaccacttaactaaagggtggagagggtcaaagtagcagttgccagggagttcctttcatatggatagggacactaggcatgggaaaaggcaacagattctaacattggtctcaggaagctccaggacatctggtcaacctggtttggcattctcattctataaggccaagctagaagctttgagaagacttttttttttcacctctggctggttttgcttaaacaatcaatgcatctgtgtgtgtcagtccctggaatccctaatgcctcttgagggcaggcaggagagtctactgggcaaggaggatatgcctgctgtgtgaagatagtgggagctggcatttaggttcagagaaatgggtcatattagagaatgctgaggaatggcgtacattggagtgacccaagcccactctaccttgtagtgaggatgctggaattttggtttctctaaaaaaaaaaatcacagaaatatttcaaattttactattttggttttaatcccaggtgtgggatatagggctgctttgtagcagctgactatgatttgcctcgagctctaacagaggcgtggttttgctagctgcagagagtttctgtgatttcaaattctgggaaaaattttcagagggtatataaatgccagagccctgatagggggtggatagttgttgggtgtctaagggtactggatgcagtttgctagtagtcgtgctcaaagaggaaacaagaagaaagaaattagatttaaggctctctgtgctctctgtgcttctttctctcctatctcgtgatagcgcatgaaaccagggggaataaaaggttagaaaaagaggaacccacaaagtagcaaagaccagctacagtacctctctggttgactaatggcatatcagggtggaactgtgatccagttgatcaagagaagttataaatgtctatattttcccaagtatgaattttctgtatatacaaaagttttcccactaatccagattataaccttgcatgatccagactcagtttccctacaatcctgatgttaacctgcaggctgtgagtcttgcaaaacaaatagagaactttccaaccttttcgggctgtgttacccccacgacccctaaagtctagccgaacagaaagattactgggtcagcccttgggcatccagttgggaaatttcaagttcctttttgtagggagatggtgaccctatattatgccatttgacaatctcaataccctatttcaaaagcccacagcctactttgctttctgttgctgtgataaaacactacagcccagaacaatttagcgaaggaaaaggtttatttgaccaacgcttccgggactcagtctattccggagtggtgctagagcagggacccaagcaggagcttgaagcagaacctgtggaggatgctggttgctaggttactgcaggcttatgctgggggggggggcagggaggaggggggcttttcttacacattccaggctcacctgcctcaggatgttgccgcacagtggtccccagtcttcccacatcaaaattcaccatcaagaaactccacctctaccccacctcaccccaccccatttcccacagtccctcagtggagtccctcagtggaggctttcctctcaggtgtttctatcaagctgatgattgatgctaactaggaaagcacagaaggggtgagatacataaagaagccacattgatggacagatccaggaactaattttgaattatcccacctggagggactcacctgagcctgagctttgctaagcagtcttgatccttttctccacagcagccattggggtttggtagaagtgactccccgagaaggtgcctttcccataatcctctgcatcgatgttagaagagactgtctgcatttaatccataacctagttagtgagcctttcatcagcgccccccccccccaagcacctctagacaccacaccattaatctgtgtggagttagtattttaatgaaagtcggaaaaagcaaattccttttcaaaagcccttgtcattgaccctttttcttgatggaaccacaggttactcgtgcttctcccacagagtgcattggctggctttaatgactgtgacgttctcttgaatagtggcttcaggtcagttggatctaggtgcttaaacgaaatctgagaagctcagtctatgtggtctctctcttttttttctccaagtctgcttctggagtggttctaagcttctgctcttagtgggaagggaaactgctttctcaaaggttttcgtgatggtcccgatgctgactaagttatctttatccctggacacaactttgaaaccatcacggtattcaggggatgatagaagtttgctgggccagatgttcatatgtctgcctgctccacgaggtagcatgtgggtgggctttaggtagatgaaactgacttatgtcatattaataataataatatttatttacatactgatgtcagcttcctctccatcctctcctcccagttcctccctttacccccccactccccacctacatcttaatagtaaataagacatcagtttttgatcagcttatattatgtaagggctaccttgaggttcagtggaagttgccacagtgaccctgtttgctttggtaccatcttcagggtcactaggagtctaacaggagagtgagtcacacaacagcccaggtggccctaaagaatctgggaatgaatgtgccttgcttcaactctagctttgaaagtggcagttcgctgccagtgctgacttcaggagttaggcagcgaggagcagagacagggatagctgaaggatgctgggtggtacatccaggagccagagagggaagggaaaacccacatgggtcctgggagaataagaatagcagattttaagagctctgccattagctgagaaggaaactagacctggtttgtttcttactgcacctcaccgctgcttggtattggttgtcacttaggtctcttcccagactaagcaatctgatttagaactagcttttgagtcttctgcccattgccacggaaccctcatcaatgtttaacccagctatggccctgggtcaacttcagatgtcccacaaacaaaattctcctctttacctctgaaagaacagaaggcccaaagccagaaatgttagcaaatgatctgcaccctgtggaggttggtcctcagccctagtcccaagcctccttcagagagtctacaccaggcccaccacagaggcgagagaatttttgggtgagtctatgcgtccagatattactgtcagtgcaaagagactctgtagcaaagttggaaagatttattcagattgaaagacaactgagaagctccggtttataatggagatcagaatgaagagatatgtgtgacattcagatatatctgtgcctgcttcctgcatcaatgtggggtccttctgagggcgcaagagtagggcaaagggcagagttcattcaggcctcagtcttccatgatcctttattgccatgacgcccacagcaggcatgagaactactccttactgttacgctgaaatctgcatgtgtggtccatggtatctttctcttttttagtttttatggtgccttgtgtgtgtgtgtgtgtgtgtgtgtgtgtgtgtgtgtgaatctcttccaaacatgctcctagcagtctagaaggaatgtgtgcaggctgaatgcacatggatgatgtctattccctctgtttcaacttgacgcaatgagccggtgagtctcaagtattctgtgtgcattagaagcctcaagggtgagatgaactacgttaactccaaagactgtaaatagaatttggagtagtttggttagaagatagtaatttgagggcattattgctatttgagtttatagtaatcaatacatagaatgtgtgtgtgtgtgtgtgtgtgtgtgtgtgtgtgtgtgtgtgtgagagagagagagagagagagagagagagagagagagagagagaaagctgtaattggtatgggcttctccccaaaccgtttgcccttctgttatctcctttagctacgtctctgccttgtgaagttggcaggttagaaatactcacattaacttgttgctcagagaaacagagcctccttgaggttagttgactgcaccaaagtcaaagagttaattaggagaaagtcaggggtgggttccatgaagcagacaggaggcgatcacacttgttactcggaacctctcacaatcactctagagacctgcaaaggaaccattgggattggttttaattctttattttaactcactgagtcagtgaccagatattgtgacaacatgtagtcacaatcacctgctactccagcttcagggnnnnnnnnnnnnnnnnnnnnnnnnnnnnnnnnnnnnncatatgtacacacacacacacataaacacacacacatatatccacacataatacacacacatacttacatatatacacatatacatacatatactcatataaacatacacacacacatacatacatacatagaaatatacatgcatatgcacacacatatatacacatacatacacacacatatatatacacacatacatacacacatatacacacatacacacacacacacacacacacacacagagcatgttgtaaaacctacatcttgtctgagcatcactacactgaagaggttcaccagctcacctgactaccagacaccatattggatggcacagtctaaggtgtccataccaggggccacatatctgccagagctaaatttcctggttccacttcatcctttcctttcagtaactatttcttaagtgtcgactatgtgtcatgtgctgaagctttggtgcaaattttagaaggttggatttttgcatgggaagtacacaaaatttacattgtcacaagtgagagcaattttggtgtcacgttgtgctgtggaggacctcctaggttgagatggatgacagtagagaggctcaggctgacctgtgagctgaggctcaaacacagaaacagtcatgtgtgtaacaggcatggaagaagatgctcagggatagagaacatacgtgcaaaggccctggggcagggcagtgctcccatgacacttgtattgaaagggacttggttgccttggtatcctgaatactgatgcacagaaggttggcatgcatgcacgcatggattgctgggtgggtggatgggttgatttgatgagtgtgtggaaggacaggcagacaaatggatgaaagagtggaaggagagatggtgtcttagtttacttcctactgctgtggtgagcaccaaaaatgccaagagaaacttggggaggaaaggatttgttagagtccaccatgaagggaagataaggcaggaactgaagcagaggccatggaagggtgctgattattggcttgctcagcctgctttctgcttctgctgcttcttcttcttcttcttcttcttcttcttcttcttcttcttcttcttcttcttcttcttcttcttcttcttcttcttcttcctcctcctcctcctcctcctcctcttcctctccttcttcttcttcctcctcctccttcttcttttctcctccctttccctcctctccctcttcctcttcctcctcctcctcctcctcctcttcctcctccttctatgtaggagggctctgtctgcacgcacacctacatgccagaagagggcatcagatcccttcttagatggtcatgagccaccatgtagttgctgtaaattgaactcaggaccctctggaagagcagccagtgttcctaactgctgagccccctcagcagcccctcagcctgcgttcttacctatcccaggattaccagcacagtagaccaggccctcccacatcaatcttttatcaagaaaacacccccgcagatgtgcccacaagtcaatgtgagggaggcagtttttcagttgaggttctctcttccatgctactccagtttgtgtcaagttgacaaaaaccaaaccagtccacttcttgacacaactgggggtgctatgagagtccgctgcccccgtcagcttcggtgacttacccatggcctagcaccatgccgaggtaaacttgggacctgcagcactctctgtgctccatagcctgcccctgtgggccttgttccggggctgtgggaaagggggtgtctcctgagtgtttctttgcagaggtctggaggtggagggggtggtccaaagtatggagcctggtaccagcgtgaggccagcttaggggtttcattacggttaattacagccgcacctcactgcgagggagcacaggttcttattgctctcagtggagagaagcttccaccgtgcccttaatgagaactttgtctctggctggctggaaatcggaacgtgagcatgaatttagatgaggttttttaaatccacgagcaacccagagaggcagcctcctaaatacctgcccactcccaggtgagtctcaatggggtgccaggaagaaaaccaaaacccaaagtagaagtttctagaacttgcagggagatggtgagactggggaagctttgtgagaaacagctcctgggcactgtgggtatctgttgggtcctggagataaagggtgttctcagtctctgccaaccagatgctgagcagcaactccagccttagctaggacaaccaacgacacctctggacagcgcccattaccaccggaggctcatagctgcagacgaattcaaaaccccatgtttggactgcgctctgcttgctgtgtgaccgtggacaagtggctaaccatctcagaggagaaattatttcagaaggggctgggcaggatgaaatgaggcgtcagtaaggtgtcaggtagagcattgtccttttcagcatcctaccccttgtcccttcttctgggaccctggggatgtttccctttctttgcatgcctccaagggccaagggccatagagggagggatggggggatgagggatggaaaaatgagggataaaagatggaggggtggagggatgtaggacagacatataaggggtgaagggatggagggatggaaggatgaagggatggacagacagggggacaaagggatatattcatagaaggatggagggctggaggggcagagggatggagagatggagggatggaagaatagacagatggggaaagggatggagggatgagtgatggagggatgagggacagagggatagaagaatggagggacagacagatgaagggatgaagggatggagggatggaaggatagagggatagacagatggggaagggaaggagggataaaggatagagggatgagggatggagggatagagaggcagagggatagagaggcagaggaatagagggacagacagatggggtggagggatagaggaatggatggaaggaatgagagtgagttttggaggcctgccattctggcccccaaggtctcagggcttctctatgctgctccttctattcttgtgaggatttagcacggggatggggcacacaagcaagatgactagaaccaaccttctcttcaaagaatggttcggcttataatctgcaaccttcatgtaactcttccaccggctgctccaaaaagaataagagatcagtgaaattcaacatttgatccacccttcccctgagtgactggttaatgagccccgctttgataggggcagctgccggctggccctgactcccagtcatgaaaggacgccccactcacacccctcaccccaaccacacttcctcagatgactaaagtgagggatgaataaaatgggggagatctttggctcttctccatcgctgacatccccagtgggttgaactggttggtttgtctatccctgactcagaagagtcaagggtcaaactgctggattgcaggtggccgggagatcaagtgttcaaattcccaagaatccagatgatgtttcatgtaaaccaccacagctagaacctggaattgtaagataaaagaaacatttttttttccaaggagatggctcagtaggtaaagggcatttgccaccaatccttatgacttgagtttgggccctgggagcagttgacatctgtaaattatcctctgtcctcctgtgtgtcatgtggcacccacacccactcctctccactcccccaagttattatacatttctgagaagtttaagaaaaaaaaaatcaaggaacaacactggcattgatctctgaccatgtcttagggtttctatcactgtgatcaagaccaggactagaaagcaagttggggaagaaaggggtttgttcaacgtacacatccatagctcatcactgaagccaggacaggaactcaagcagggcaggtacctggaggtaggagctgatgcagaggccatggaggggtgctgcttactggcttgcttcccctggcttgctcggcttgctttcttataaaaccaggaccaccagtccagaaatggtccctttcaccataggttgagccctccctcatcaacgactaatcaagaaaaatgctctacaagtttgccaacagccccatcttaaggagcattttcttagttggggtccccttctctcagacgaatctagcttttgtcatgttgacatagaattagccagcacagacctctactcatacgcacatacacatgcacatatgtgagcaccttcactgatgtacatagatgcacacacacacacgcacacgcacacgcacacgcacacaagcacgcacacgcacacaagcacgcacacgcacacaagcacgcacccacaccctcccccaactcaatggcgggggtcatttgtccagctctgtttagtgtatcccctgagctaaaagcattatatttttataattttccaccaactctcacaatcccaaggcatgatcagttatcagaatacagatgaagaaagtgaacttcctacaggtccaaatgcccacccgcaccacccaaccaagttagatctcagctcagctctccaaagccttagcacatgaagccctggcttccggtctatgctccaaggtcaaatccttctgcctcagggtccaagggcatccagcttcccataacccactcaggacggccttctgcctagccccgctccaggctttcccctgcagtgcacaagaatgttccgccactcttattaccccaccagtgctcggaaactctgtttccttgttgttaaataaaagatgagaggcagataataaaatccagatgcccccgaggccttccatgtcacctgccaatttttttctgttggtcatttctcttccccttttaaacaaaacagaaatgaaggcttgatggcttcagagcaagaggccatattcaaatggcctcattacctgtcacaccagcttgtattttcatctcttgttcttctccttagattctgcttggcaattcagtatgttctcaccctggtcaatgtctgtccccacttgcacccctccagcgctggctgtaaccttgttctacagcctttcttcttcagatgggaacagggtgtagaggctctccaataaagagctcttagcatccatgtcccttagagcccggtggttcttcgtcctgatcactcagccccctcccagagtgcagaaccacactcagcagggctgaagagtgggtagagagcagagatactgtttactgcatgcaataataacgtgtgcattgatgttcacgttggttatttgccttgctgcttggttaagctgtaacttacacaccgtaagaagctccctcttgaaacagttgtgacggtgcacacgtattattacttcagcacttgggaggctgaggcaggatgatcgtccacgtaaggacggtctgggctacacggtgagactttgtcaaagagctgagtgccaaggggctggacagatggctcagcagttaagagtacttgctgctcttccagaggacctaggctttgttcctaacactgacagggtggctcacaactaatgaatgccctcttatggcctccttgggctcctaggttcatattgcacacataagtgcatgctgactcatgtacaggcaagtataaatctcaaataaataactctttaaggaagatatccaagggctgtgaagatctcagtggtttagcacaggtccggcaaacattataatagcatgctgctctatctccagcatcacagacagacagacagacacacagagacacacacacagaacacacagacacaaacacagacacacagacacacacagacacacacagaacacacagacacaaacacacacacacagacacagacacaggagcataattcaatgcacacagttcatctcccttgggctctcaccataggtggccatggagccaccatttgttcttctgtcttcatgacgacgacaacagggccacctttaaatctcccacctagcagaatggctttattctgacaggaagtgtgactcattgctatttagacagatctggcctctgagcttaacagccactatctcagagagctcagctgtacttgcttgcaaaagatcattctagcttgactcagaccatttagacgccctcagagagggccagggagacccttacctgagtttccagcctcttctactacatgttgtgtgcggctctaccctgattgcatatggcctcgggaaagggctagtgcatacaatctggtagtgaggctagggcagctgtggggaagccgcttcctgaggcccttttgggagagaagcctcccactccgtaaggaagcccaataaactcgctgattacctggactaaacactggtgaagctgtgcctcggtttgcatttgaaccttagcgggaggggtagatgttgcttaggtctcctcctgcgaaggcattttagtgatgcatgttctgagaagctggtggtggttgacatatagacagagaacagtgtaggcagaggacatgacgcctgggtgagcaatttcaccccctaggctctcggttttcccatatgtgaaatggggttggctgtaaatgtattggaaatactcggcttcagactctctcctgtgctttttgtatactgccatgatgtgtaaaaaattgtcctgctgggatagaccccacccaatgaaaccgttagctgatgcaagactctcctctctccattatggacatttgaacaagacatggcccattaggtgtgaacttaccttgtatcgcctaccttactcccagccccagccccagccccagccccagccccagccccgcctcacacacagtatttgtcttgtgattggatccctttataattgaagtgacattccaagaggtcagtttgctcaagatcagacacacagcagctatgccatttactattagaacccagctctgaatccagggccagctgcccctttccctggctgcacacccccattctgctttctttcccgttacagcttcatcatcatcctgagaacttctgccctatttctgggtgagcttttcctgtttgtgttcagagagaaggaaggatacccgttggtagtggggagatgtccctttcctaattcacccggggtcagttgtctggctggggttagaggacaattatgcctctccccacacccttaatatgttatagtctagacagagaacattcagaagggttccagggtggggccaccagcccctgcttgtccccacttcttgcaagtgcttgctgccctatccatacctggatctaactgtcctggtttgcttcctgctgttgtgataaaattagtgacaagaagccacttggggaggagtgagtgtatttcagcttacagcttatactctgtcactgagggacgccaaggcactcacccaaggcaggcacctggaggtaggaactgaggaagacagaggccacggaaggatgcggctcaggtacccgagacgacctgctctaagacggctcttcatgccacgagataggcctgcctacatcatttagcaatcaagacattcccctacggacctggtcatgggccaatctgaaaagagtaattcttcactgaatcattcttcattgagcccacctcacccccccattccactcttccctagtgactctgggctgtttgaagctgacaactcaagtcaactcttgatagcaccgccatcttaatgtgtttggagggaggtatttggatgcttggaagggaagctcggttctgtcagcatagtgcagatgtcctgacatgacactacctgtcagctctggaaattactttgatgtggttaatggggccatgactcaagctatattgcctgcctaccccagggaccttttaatttctccttttcctttttcagctggatggctttatttgacatcttattatagattctaattttgagttgccgtaaatgacactccctcctcccaaaccaacatcgtcactgaactatccgggtgtctattatgtggtaggcgtcactgattagttctgggcgcagaagtgacggagaggaacaaaccccacccttgtggagcagttctgagaggggaggccagagacttctgcaccttcaccataggtatctgctgaggtcaccaggaagagacgattggcgctggggaggtgggcttgtagggggtcagagtttgcctgtgacatcagtgaaggcttccagaggggactagagagaggactgaagtcaaggtgtaaacagcacgtgcaaaggtcctggagcgggcaggggagcatgctgcacctgactgataagtgaccagggagatagaagagagagctcggcacttcttgcataacctgcagagtgcatggctgctgtaaaaaaaaaaaaaaaaaaaaaaaaaaggacttataattggtgtcttcaagcaatagagttttattttcttcccattattctggagtctaaaagtctgagcaaagtgtctaaggctctacagagggctatcccttgccttagataattctgggacagctatgattccctggttgggtaatgtcattttaattcagtctacctgtattgtctttgcatggcttccccccttaccacctcagcctctggttatatcaaagtgttcccatccttcctcgtataaggacacatatccttggtttaggttacaagtggataactgagaatacattcacctcagtatccttaaccggattacacacgcatcatgtctcctttgcttcgactagggtaacatcacaggtttggatggttgtggtcaggggtagggtgtctaaccctcccccaagacaaggggaagcttaggggtcaccagagagttgttagcaaaagtgtgggatgaactcactgatgctctcgatattttcattgcatcatctatctttctgtctagctactgcgtgtgcacacacgtgagtgccacggtgtacatgcgggagtctgaggacaatctgcgggagttggttctttccatcatgtaggctgtggagatcaaactcaggttcgtcaggcatggtggcaagctccacttacaggttgagtcatcttgctgttcccacacatggtttctcttctgtgcagaggtcgaagatggttagtgctcaggtctgctgagagatgagacaccagagccctgtgcagggagtggggagtacagagaggcagatggggtcagaaaggctgagggagttcgtgtgtgtgtgtgtgtgtgtgtgtgtatgcgtgcacatggtgtatgtatgtgtgtgcttgtgcacccacacatatgtatgttaagcacatggtatatatacttgtgtgtgcatgtgtgcacatggtgtgagagtgtgtgcatgcctacacttgtgtgtgcgtgtgtgcatatggtgtgagtgtgtgtttgtgtgtccatgcatgagtgtgcatgcgcatagtatgtatgtgtatttgtgtgtgtgtgtgtacacatggtacatgtgtgtatgccccatgcacttgcggtatgtgtgtgtaggtgtacatactgtgtgcatgcaaatgtgtatttacatacgtgtgtacatgtgaggaggccagaggtcaactgtccaccttgtttttttaagacaaggtctctcactagcctggaatccatcacacaggctaagcaggctgatcagcaaagcctgggggtcctcttgtctcctctcatgcccaaccctgtgctggggtttctaatgtgccaccttccctgtctcttcttcctgggttctgggggattgaacccaggtcttcatgcttgcaaggcgggtactttatcaactgagctgtcttcttagcctgtgaactctcttctttaattattagctagcatggtatattccagcacggtttcctctggtggtttcagcattgagcactgtaccaaacctagttgcgcaggatgtatctgaagtcagaacggggcggctctcccgcatcctagagaggccggcactcactcagcggatgctcctcttatcgctcagctttcttgtgcgcaaatgtttgctttgctgcagttaatagcaccctcacctagctaagtgcacgcagcgccaggcgggcaattacagcccggaccagcttgatctgtctccggcttgatctgtctccggctcattgacaaggcatcattatttttcagtaacgttatgatttttttttgctataacaaccaggcttgttccgcaaccgggaaaaataaacaagagagccaacttggagagcactgagagttgtgtttaatttgcacctaatttgcatgtcattaggcaactccttgtaccataagctgaagcctaggtaggtgaaggggcagatgcctgctgcccatggggtgccttagaggagttggggggggggagccaagaatcagggctgtggaatctgggttcagtgtcccgtggtcacatctagcagtatgtctctgtgtggcttataggtgagtccacagtcacatcctagtgttctctagtcacactggcttcatagccttggggaaagtttccccggcacaggtacacgttcatcaggctggtggctggattcaatgaggtgatgtgttgataacactgagcaggggagtcttccacagattccaggctggcgagtggcctacaggattcatggatgccttgcggacaggcgttcatgtgctgttacctgctggcaaacccacgcacatctctcgtctcgtgagaggtgggactccaagtcttcaagcagccactgggcagtgacccctattccagggtgggccacattctgtagtgatgttcattgactttatcctattcggggatggtgcgatagacccttggagaacttcccgtgaacctctgactctcaacatagagaggcccaagtgcttcagagggctgctcttctgcaggtacccaaggagcccgagggatctgaaaccctggaactacagttacaagcagctgggagctgcctgatgtgggtgctgggagccaaacccaggtcctctgcaagagcggcaagtgctggctacttctctgtgtagccctggatgtcctggaactcactctgtagaccaggctaaccttgaactcatagattaatttgcctctgtcttctgagtgttgagattaaaggtgtgcggcaccaccatctgattcagaggtggctcagtggttaacagtactggccactcttacagaggacctgggtttgattcccagtatgtttgtgtcagaaagtgctcttaactacagagccatctatccattccaagctgatttattccgttactttctcccttccctccttcttcccctccttcccctcctttctcctcctcctcttcctcctcttcctttctctcccccctcctcctccttctctccccctcctcccnnnnnnnnnnnnnnnnnnnnnnnnnnnnnnnnnnnnnnnnnnnnnnnnnnnnnnnnnnnnnnnnnnnnnnnnnnnnnnnnnnnnnnnnnnnnnnnnnnnnnnnnnnnnnnnnnnnnnnnnnnnnnnnnnnnnnnnnnnnnnnnnnnnnnnnnnnnnnnnnnnnnnnnnnnnnnnnnnnnnnnnnnnnnnnnnnnnnnnnnnnnnnnnnnnnnnnnnnnnnnnnnnnnnnnnnnnnnnnnnnnnnnnnnnnnnnnnnnnnnnnnnnnnnnnnnnnnnnnnnnnnnnnnnnnnnnnnnnnnnnnnnnnnnnnnnnnnnnnnnnnnnnnnnnnnnnnnnnnnnnnnnnnnnnnnnnnnnnnnnnnnnnnnnnnnnnnnnnnnnnnnnnnnnnnnnnnnnnnnnnnnnnnnnnnnnnnnnnnnnnnnnnnnnnnnnnnnnnnnnnnnnnnnnnnnnnnnnnnncagtcatctcaaaagcacttgagagggctgggtgcccactgagttggtggccaagctgtagggatacaccttctcaagccctgccttctgttcctcacaacctcaggggacccctccaccctcatggtgaggatggagagcaacttcctttgcagaagacaggtccaaggagcgggaaagtggtccttgctttgctgcctctgaatctctgctttccttagctgctgagactcttccagtcacctgaggacactcactgccatgattacttagaaaaatgtgcccattacggacctgctgtggaatgaactccaccctctttggggttcaccatccactggtttccttatgatccgggtaatatgtctatcatggctggagtgagacctcctttaaacccagtctggatgtgtcagcctccctgggtggcaggtggctccatcccatacttcagtggcctgagttttatggctcttctggctcctggtttataaacatggcatttgcctttgcgtcttgggggagccttgaacttctaattaaattggctccaagcaggtggaaagcaggcagctagggaggggatggaacagctgtggagaaggtgaagggggacctgtttccgctcagccttcgcagggcccctcattgtgctggttgatgttggtctttggtcttcttttcccaaagatcagctccccatggtactgcttgcctcagcagcaccctctttggctgccctaaagaaaagtagtcactgttcttccagtgtctatttctctggtccacaaaggctttctcttgcatctctcctccccaccattcaagggtgggtatccatttgccaacacagcacaatatttttttaaacaagaaattatgctaaattagtcaaaatgcaaaatttactgcatcaagtgcatggttgaccaacagtctccagaacttttcttacttcaacggaaactttagcaaagaaataatcctccatcacttcctaaaagccatccctttagggctctcatggatggggacaagacatcctccttttacaagggtgagttaggagagtaccatgaaactcgggggggggggtggacgacagagcatttaatgcaaggcttgtggggagccaagtgctcagagggagcccttctgtgtaggagggggtgtctcccctcacagaggtcctgtagcacctgtgaccttggaatggaagccaccactgtgcctgccacctgtgtgttcctctctaaacgatgcctggagacctgggacttcctggaagcatctctgtattagttattcctctcattggtgagtgaacacacagctgacagaattggttcacagtttgagagtacacggtccatcatggcggcaggagcatggcggctggctgcatggcatccacagtgacgaggcagagggtcatgtaggctggcttcctgctcgcttcctcttttttatttgtcccaggatgacaagcaccgagtggggccaccacagtcagggtggatattcccaatccagccaaatttctttggaaacctgctcacagccacacctagctcgtgtctcctaggtgactctaaaagctgtcacattggaagtaaagaaaaaccattgttccttctattcttcttcagcttaccagggctgacaggcccttggcatggagtgtcttccattggctccattggttctgcttgatttcttgcctgctccatcttggctcccagactagaatgttggctgctggagaacagagtggctttggcaggaacaatgtccacggttcctgactcccataatcattctgactctcatttctttgaactctacatgcatgtgtgtgtgtgtgtgtgtgtgcatgtgtatatatctatatgtgtatgtgtgtatatacacgtgtgtctgtgtgtatttatgtgtatgtatgcatgtgtatatatgtgcatgtgtgtctctatgtatttatgtatgtatgtatgtatgtgtatatgtatgtatatatgtatgtatgtgcttatgtgtttgcatatgtatgtgtatatgtatacatatgtctctgtgtgtttgtgtatgtgtgtatatctgtgtatatgtgtttatgtatgtgtgtatatgtatatgtatacatatatgtatatatacgtatgcatgtgtgtctgtgtgtatttatgtgtatgcatgtatatatgtatgtgtgtatgtatgtatgtgtgcatatctctgtgtatgtgtttatatgtatgtgtgtatatgtttgtatttatgcatgaatgtgtgtgtgtatatatatatatatatgtatatatatatatatgcatgtgtgtatgtggacatatgtatgtatgtatgtatgtatgtatatatatatgtatgtatgcatgtgtgtatgtatgtgtatgggtgttttaatattaagttgcatttcacataatatgaaattagctatcttaagtgaacagtccaatagtttccagtgatatgaaaccaccacctctaaatagtccccaaatattttaatcaccccaaatgaggacccatctatagttaccttctacttgcatccccctgttgtcagtctgcatccatctccatggacctcagagttctgctgtcatttaagtagaatcctattatctacagatctggggactggcctctttgacttctgtgttgtgatgctccatccttttcagggatgggtaatattccacaacagagacacaccacaattagttcatctaccttttagcatctgtggataattctgatgtgagcatgcatgggtatggatttgagtaccccttcccaactcttttacatgtatatccaagggcagggttcttgggttgttcgataattctatagttaatgtttggaggaaccacaaactcttcactgcaggggtacctctttccttgcccattagtactgagcaagggtcctgtttctccttgatagcacttatgtgctgcaaacactgccacctggcagctcatggggtgcaatgtctagaagtgaagtgtctgggggtacagtgtgtggtgcaatgtctggggttccagtttctgggttacagtttctgggggtgcagtgtctgggggcacagtgtgtgtggtgcaatgtctggggtgtagtatctggggatccagtttctggggttccagtttccgggggtgtagtgtctcagagtgcagtatctggggtacagtgtgctggtgacttatttcatacttcctaacgagtcataatgccgaccgccttcatgggcacagtgactgccatttatgtatctatcttctttggagaaacgtattgggtcttttctccatttttcattattccccctttctctcttttccctcatctcctttccctccctccctccccgactccagggccttggcaggtgctctatcactgagctctgtgtccgccccctactccttttttatctgcatttgtgatttctcttctccagtctccagttacttggtcttggcagagttagagcaaaggctgagtcccttgccacttccactggcctcaggcaagcagcctccatcctcccagcttctgtttcctatgtataaatggggtcagggtcctctccttcctgctaggttcaggagcagaagatacttaaggcctggggcagcccccatcatacaggacttcctatgatcgtggctgtgttcttatccctgcggtagacttcacatgcagcagccaggcctgtgccttctgctgttgtatgttttagcataccagagaattcggagatggatgctgtcgatggatgctgtcagcagagcctaaggcagttgccagtttagagtttgccaaggtttatacctttagattaccacgtgccagcgccagcagcagccggtatggcctttgttgggtagccagagcttactgatacatacttcacatggctcgggagtgaccacccccccaaggctgcagaaccaggtgcatttgcatactgaggaaggaagctgggtgggcgtgagattggggaaggatggttagaaccatctctcaggagccccagcagggcccgggtctatggctccatctctccagatagcagtaagactaggttgtgcagggcccaaggtcttgaaagctgaattggatttgatttcctttagcctctctcctgtccacctctttagcccctcccctgcttacctccttagcccctcccctgtttacctccttagcccctccccgtttatctccttagcccctcccctgtttatctccttagcccctcccctgtttacttcctcaaccccttccctgcccacctgccttgtgccctccgtcccaagacgccatgaaatgaagtgtcccagcatataacagctttctgggtacttgaacgttcaccagtgtcctctttccctcctaacccctaatgcagtcttgattcctttcagtctctcctcagagctgtcaagagacagcaggtcccacctgaagcctcggtcattcctcactcagagcaggtgcgcagtgtctcatacaaataggagtctgttcccatgaggtcgcagatgctccccgagttgcctttagacatgcagtttctttggagatgacagcatcagcccgaggaccctgggacctgcctgaccatagatcagattttcttcctggcgagaactggggaacaggtctctagacagagccaaagccatcagccaccatcagggtttcttattttgaagccagcaaagtgccatggagcgagacctctttgatgtgataatgtgaaaatgagaattgattaaaaaaaaaaaatcactgccatttaattaacctgtgtgctggcagcgatcagtggcagacatttaaatgagtagcacgcggccgactctcttcctgtgtgtatgtgtcaagggcttaggataagggttggacttgtggctctctagttaacaggatgggctgtgttctcttcgggacctcgatgagcaaggtcttcagcccttctgtgcactagggtcttttacaacatggaatacagcaatgatcccattccaccatggtcccagtacacgaggctaatgctctggcacatgagtcagaacattatgacccatgagccattctgacccagagctggagttatagttttattgagatgctgctaggtttatagttttattgagatgctgctggattttttcattttattgagatgctgctggacttttagttttattgagatgctgtcatccatcctttctttggtttccttccttcatgtttccctgtcccttccctgactctcttcctttgattcttcctcacccttctctcatcctgaatgagggtccacctccttcatccacaccctcatcttccttccaacttctttcctcctcatttttttccaaattatgtgtgttatcacaggcagtgagccttttcattgtaaaagattctcattacacctccttcaccataaacctttatactcctcaagtacatcataaatatacagtgaatattcaagcaaaatagacatgcatttattcatatttatgtttaaatactgtttatgtatgaaatctcatactatgtgtgttgcttggcagtttacattctttatgtatcagtatgcgttgggattttaaacaactgttcttttgatctggagccaccaaaccttagctcacggtaaatccggcccaagtctcttcagtctataaagttttataggggaacagccgtcgtgtccgggttaactgtaattgtcaacttgagatatttaggtagagagtctcaattgaagaatttcctgggacagattggtctgtggacatgtctgtagtaggggggttgacttgattgggaattggtggaggagcgtccagttcgatggcaccattccctaggcagtagtcctgagctgtgtaagaaagctagctgaggatagataagcctgtgttccaggcagcaggcagcatcctccatggttcttgctccatgtctctgggtctgagtgacgctttgtgggatgatagcaagcaggcctgccttcagggctccaccaccgaagttctcatcccgacttctctcagtgatggactgtgagctgaagtataagccggacgaaccctttcttctcctaagctgcttttgatgagggtgtttgttacagcaacagagctgagctggctagactataggacacatctccattgtttacatattacctgtgactgcttttgaactagacagtccatttgagtagttgccatggagaccagacagtccaggaagcctgtgacatttgctatctggactcttacagaaaaaaaggtctgttgacttctgctgccaatcccccacctcacccctaatttcttcttactgagcacatagaattctacagcatagctgtatgatacttttaagatttcccttaattaagacacctactactctatgctgtaaaatgggaacttgccaaatgggctggatctggggtgaccttgatgctgggaaggaggctgatctctgagcccttggtatatatgactgtgatggcctcatagctgtgtgactgtgttcttgggactatctcagagtaggggctgggcttccgtttcttcttaccttctggaatgttccatccagttcagtctcagtggctatgctctcagattccgaagtctggttcctggagagtctgagcagatgttgtcctctgcacagaactttgttctagaataccaagctcgttctaccgggtcggtgacgatggcttaggtgagcgtctcactgtggagtgaccatatagagagtatctctgaggcatggggctagttgggattcgagtgtccgggacccacccccagaggtttgagaagctgggaagctgggctttgctgcgcagagcactggcttagtgcaagcaagccctgggggcgtggcttagagcagagcgttggcttagtgcttgcaagtttgtggattctaaaactaaggtctgggagaagaggctgatttgattgaaagaaagaaggaaaggaaagagatgagggaggggaggagagatgggaaggaaggaaggaaggtcacacagcattagatggtgaatgttagtgtggaacccctgcagaagccaggggaaaccccgtctgcccttcttctcccaaccctgccagctcagagaaaacgcctcctcccacacagagaaaattcagggctaacacatcatcattcctcgtgtctgaatttctggcagtgcccccaagcgtacccaccaaggggctaagttttcaaccatgtttggacaaagttgacacgccatcactccttgccttcagcggtctaaaatcccgggtgcacgcgacttcactgatttccacctgtgcgattggtgaacctgccgaagagctgcctcttaacaagtctgcctttgtctacttttaatctggtccaatctggcctttatcagcatcatcaagggagaaaaaaaaaaaaaagacaacaaaaaaaaaactatcagcgtcagttcaaggagattggagagggcagaaactggctccaactgactaagcagaatttgagcctgtttgaacactggagggtcaattttcaggatggttcagaaagcctcaaccccggctcacagaggatcgtcaccaggctatcttagggccttcacacagccagaatgacctaataggttggtgataagccaccaccagacctaattaacttcaaacactatttctcctccctagtgagtcacatcaggatctatttcccccagtgagatttgagtgggcacttggtgactcgaggaggagaccattgttctttagcgggcatctctaactgacctgtgtaggagagaggcagtccccaagtggggagggatggagacctggaggccttaagttagacatctcctgcaggacagcacacaggcacaaatatttaatgcacatgtccgactgagcagggaggcctccctagatgaagggggtccagttgccctgggcaacaggcacacccctgtcctaattcaccccaaatgataaagctttgtagcaagcttgctggctgcatgcattgagtgtatgtcaaagctcccactttggggagaacgcgctgtttctctgcaaaggtttgtctgctctggaactcactccgtagatcaagttggcctcaaactcaagagatttgcttgcctctgctaaacatgtgctgggactaaaggtgtgcaccactaccacctggatcttaatgggccacaattctttaaactcacaagaaaaaaacccaaacagccaaaggcctctttggagtccctccagactatccacgagggaccatgctcacccagaccttgctacgatccttcatgtagactcatctgccccacataagcaaagggcagccgggaagccagagaggtgaccccaccatgtcaataagaaatcttgagctcaaggctgcgcagatcctgatggggttgagatcacagtgttgagtgtggaggagagcgagctgcctgagagagagagagagagagagagagagagagagctggggagtaaggaactcttgagaaaagctggtgctgaaccccactgtgagatggtgggccatggcaggaaacttaggaagagcaggtctgagtccctggcatctgggcgtatccatctgagatggtaggcagctccctgctccctgccagattccaggcctgaaacgtatgaccacactccccatgttggccatgcagcccaaaacagagttctctgtgctaatgacatacctagaggccctgagggtttagccaataagcttcccttcctggacatccctacctacaaaaggtttttaatctctggcccaccctgagtagtggtatgcatctattttccacgatgaagagtcaataaatgatatggataaacatgaactgtgtcttctctatgcgtagcatggagaaggttttgcctacagagctgcagcctaagtctcctgtagagggcctctctgcactttcagacaactgctgtgtctctcccccacccccgagcgagcgagcggtgtcttgggacttccctaaagcccagcacctgatggcgggtgacgggacagggagatgcagtcaagtgctccccgagtttcacctccccagtgtgtgtcccacaccccagctgcagagtgggatgcggacccacaccccacaatttatagatgaggagctgagcccagtggacttagttggctggtcccaggagtccaaccaacatctctgcgtgaattgagtacccccagccgctggtgtctgggaaaggctgcttactgccttgtgggttctgatggaatccacagaactgccagataaaatgccactggttagacctggtgggcacacccagcctcttctggattcgtttgtgtgtgtgcaggtgcacataagggtgacagccttgggtgtcatttctaagcatgtgtattggtcggagacggtgtctctcactggtcagtgcctggcagctcagctagattggctggccaggaaatcccagaggtgctcttctctctgcctcttccacactgggattacatgggaactcgggattcacactcaggtcctcgtgcttgcatggtgagcacttctccgactgagccatttgcccagttctaacttcattttcttcttgaggagaaaagggaggtgccatgggggaatggtctacagggagtaaaatagccatctaactcaaataagcagttccagttggcttgggtggggaatggtctttgctggttctcacctcagcaaggtagtgtcagtgttgtgcttgcttagagcgtggacccagggcactgtctgagcatcgtgagtcctctcttgccaggagttccaaacaaatctaacgctatagcatggctgtgatatatattggaacaaagagctttggagctaggcagaaccgtgttcaaatcccacccccagcacttctgtactgtgtgacctccatcaagtagcatagcctctctgacatcttgtttgctcacctagagacgagtccccatcttgaaaatgaagaggatttgatgttttcatatacataattctctgcacaaaaacaggggctggaagccatgctatttgcttttcccagtcctccctcccacccccatcatcttccttccagtttctggtattagtaagttgatgctctgctccattctctgacccccaagtgaagccaaggaggagtgtgaagaagcctggtcctttctctagggagagcatcatttgttgggctgacggaagcctggccttgtctcaccagccccagggagacggtgaacagagacctctgaaccaatctatcttagaaatggtctttttttttttttcttcagacagagggaggaaagggggaacatagcagaaagcatctagccagatgcctagcgaaatctgccccaaatcagccatcctttctaataacgaaggttgtcatgagtctcagctcaatcggaaatgacaggctgtgtaaatatttgctctgtaactgatttatagggtagggaacaacaaaaaataagattagtcactaatcatggggctgcaggaagagcaggaagcctggatgccaggccccagtgcctgcaaggcccaggccctaacccaggtctgcacgtactctgagagatggggatggaggtggtgggtgggtgctgtgtaggggcatccacgttagggtacggacttgtggatcattctatagggtaaggtccaggcagcactgtttgtatctgagatcagcctctagctagacgcccagagaagactgtaagctggaatgtttcttgtatttgacagctgactaatttccttttgggatgggtgcttttgagaaataggagcaagtgtgtgtgtgtgtgtgtgtgtgtggtcatctcttacaccactgtaaggctgacagactgaggtagagccaacatccaggtcaacacacccagctcttactgagttgctttctgagtgcatgaactgttgggagggcaaataatgggcattatcattccttctgcaagtgaattgtgtctgtagctcactgctcagcctctggcattccttggtgtggcagttcccactcccttgttctgaacttcctgcaggttcagctccacacactgccactcagagccaacacctcctgtcaaagctctaccctcagggtggatactggctttcacctccctgtagcatctaggtatgtgcacatgtgcatacacacacacacacacatgcacagcttccatgaacatgacacacagaaaacacaccctctccagtctcttctcatatctaggcattagctcggaggttcataaagaactgctcagacatgaccttccagcaggatggagacctccatgtctatgagctgattagaaaggcagctgtgtgcatccaaaccagggtccaagctgtagaaagccacagctactagtgatggggctcagctgttccaggaggaagagaggaagatcctggatggactctgggtatcagggagaggcactgcctagcaacccatacccaggaagtgaaattcgggtgtggctttgagtggccccttgggtgaggacccagtgaaccccagtgtgggaccagggtgtgtcctcgataacccagggatatgaggcttcttgctggtggcctgccacaaatgcagttgagtatgacccagttattcctaaagcttctagggagacagtttccagtccttgcagaagctatctgggaacttccactcagccccaccctcttccatctttcttctgcaatttcccttcaaccaaaagccccaagtaacagggaagaaacagcaatttaatttacccctctctcaaacctgggctttggcctatcacataagtttcaagtgtgtatctttacaatatatacattatatatgtcatttgcatatacgttttcatttctaggaacatttttttgagactggctctcacatagcctaggctggccttcaactcactatgttgccaaagatgaccttgaactcttgatatcctgcctccatctccagagtctggggatcacaaacgtgcatcaccacatctggtttgtgtggtgctggggaccaaacccatggcttggtatatgctagacaaattgctttaccaactgagccacatcccctgggattctctaggaatttatagagaactatgtttcatagtgtgtcaaccagatcttcaacacagattactggtgaacttggagtatctaattgggaaacagagctacattccaaatttgatcttgaacttggaacgtcttgaagaaagaatatgaagtcgtggtggactgcgtctgccatcaagggcattgctttctttcttagaataaaatagagagaaagcgttgcatacgccatgtacaatatgccttattatttaaaaacagtactccggttactaaattgaaacagtggagacgaatctaaaagtaacgagatgtctgtctccgaaatccgaacaccctcacagcctgccaactgcttcctcgtgtggatccttctagaaaatgtagatacagatgtccctgcctcggtgtggggtctgctcatgatttcctagtttacaatggcgtgaaagcaatttgccttcagctggagctgagtttgtgcgctggcttctcatgtctctgtgggctggcaggattcagtgagatctccctatgccgggcagtgtcagtgagccgtggttcctgtctgtcacacattcttgaaggggaacggctgcttttctgtgctgggctggggagctgagtttcgcaagacttggtcgggtgggtgtatccagtgcctttttcagcctgtgatagtttcactgggcagtgggttgattgggacggacccatgctatcagcagagggacagtgtgctcttgtgtgtgtgcccttacttttctataggacacaccagttgaggaagcagctggggtctccatgtatccctccctattaaatcagccagcttggtctaaagagctgggtctccatggactacctccactcccacaaccccaccctagcttaagccattattgtcttgccctgacagtcttttccctaataacactgtcttagtcagggttctattcctgcacaaaatatcaggaccaagaaatacttggggaggaaaggacttatttagcttacacttccacattgctgttcatcaccaaaggaagtcaggactggaactcaagcaagtcaggaagcaggagctgatgcagaggtcatggagggatgttccttactggcttgcttcccctggcttgctcagcttgctttcttatagaacccaaggtgaccagcccagggatggcaccacccacaagaggccctccttccttgatcactaatagagaaaatgccccacagctggatctcatggaggcatttcttcaactgaagctcctttctctgtgataactccagcctgtgtcaagttgacacacaaaaccagccagtacaaacacttttttgtttcctggcaaagaagatggaactcaggtgttgcacatgtttggcaagtgctctgccactgagctacaatcccaaccccttactgagggattctaggcaaatgccctacagctgggccacacccatctactccaattcctctttaattaaaaacaaaaataaagattgaaagagttatgggtgcttgagtgcatgtgtgtgtatatgtatatgtgtgtgtgtgtgtgtgtgtgtgtgtgtgtgtgtgtgtgttcatgcacgtgccacagtgtatgtgtagagatcagagaaatgtttgagagctagttttctccttccaccatgggttccagggatcaaatttaggccatctgtgagcttgcatgggaagcacctttccccactgagccatctcttctaccccattccatacttgccccatcagactccactttatacttcaagcggggagaccctttaaaaacacagtctcatggcatcccccctccagcttcctggggccattggaatagaatttaacctgtcatcaaaaaaatggcagagcagatctgcagcggtctggtccactgcccccaccctcattctgagttccctgccctggctgtgcttccttgccatgccctcctgacagcacccctgcctccctcctgaccccagaccttcccaagcctcccttctgcctgacattcagggctctacagaatgccacacctgacctctcccgggttaccaccgtgcttctggatcttgcagccccagacctgtttgctgggttacctggggatgaatacacatcttttaaaggcacagtgacaaaggggccataccacacacaccgaatttacttctctgtcctcccactccataataaaagttggtgcaccctccaccctgactctttccagcctgcagctcctccatctgatggaatggtggtaatttaattgaccactccactctgaggcacagtgaagaggctttcagtctctggcaaggcaaagttaatttttctacgatgggtagatagaaatctgacaagagaaagaagagaggagagggaagggaggatgggggatgagagaggaaagagtaaggaggagggaggcaggagatggaggggaaatggaactgttgatctagtggtgaatcattgttggggttccctcctccattgtgggagttggagtgggtgggagtgaccaagtgtttcatcttctatagcagtggccaatagccacatgcaactttttttaaaagtctgaattgtattaattagtgagtattattgttgaatgcacatgtgcacacccatgtgccccagggtgtgtaagtgtgtatgtgtgtgtgtgtgtgtgtgtgtaagtcagaggactgatcgtggggattagtcctcttcttccaccatgtgggtcccagccatgtaactcgggtcatcaggcttggtggtggcaggtgcctttatcctctgagccatctggtcaacccacccatggctctgcagcgctgtaaaggtgcctcatgtgaccagtgaaaaggattttccatttaatcttaaaatttgaggttagttgatgttttagcagctttgaggagcagagtagatttaggcaaatgaatggctccattctctgaatggatcgtctcagcaccttgggactgggcggtggagtgggaggagctgggaagagcacactagtgatggtccttgttgctgttattgctttgtcatagaggaaccaaccatgtctccgattagacctgccagttaaatcacaggctattccctagcctgaggctctgaacagtcaaggttatggaaaaagacggagtcttggtagtcacacccagagagtactagagcttagtagttgagcatgtctgagctctgagcatgaagtccactcagtggtactcaactgggatcaggcgtcatagcattatgtggctggagctctgggttagggctctggagcatcctgtgactctgtgagttcatctaagtgatggtcctacccctgaagctgaggctgctagactttcttgtgtacttcccatcaaaagtggtctttcaaccaggggtgctggcacatgcctttaaccccagcacttgggagatagagggaggaggatctctgtgagttcgaggccagcctgggctacagatcccattccaggacagccagggctatgcagagagaccctgttttctaaaaaccaaaaaccaaaaaccaaaaacccaaaaaaccaaaaccattgtatttcttcccagcatgcttctagactttggagatggcagtggatgagacagggatggaaaggcccagtgagatgggtcagagattcaggggtcaaggacctcatcattctgggagagataatttgttccaagcctcaggggagactttgagtgaaaaagggttacacctcatttgagggcagttcctaccctcatcacacagggacaatcattctttgccctgtcactgtggccagtagatctttgtgtgtgtcctgagtcagaggtccagagcgaaagtcttcttcatggacacatgtctatcatcacacagttttgagtgctgacctggctccccacaaaggactttgtcccctatccagaaacaaaagcttttcctgacaaaggacagaggcaagaggaacctcagtaggtcccacccagcagctgactggagtattcccatccagtttattggctccttagaacaaccctggtagaagttagttgtactagcaaagacctggggactcagagaggttaagccacttgataaaggtcatgcagctagtcaaagggtaaatacacagtacagaatggttcctcaaatttgctaaattacttcgaggccagattggctatttcaacctttaaaaggccacgctctcagcaacttagaacactcaagaggcccagcagttaccatctctgcccacttccaggccctttgtgaccccaaagcaaacagcagaacagcacctctccatgcacttggccccactccccgtcctgtcctccagccctggcagctgccagcctgctgcccatcactgaggacttaccccttctggttgtttatataaatcagaatttgtggttctttgccgtgtctagctttctttcagaggcggggcagctccgaggtccccgtgtgttaaggctgtgagtcggaacatcatgagactgaagtgcgtttgattgcccagacagattccccatttgtgctcctttgcccagtgatgcgcatttgggagctttttttctgccctttggtggttgtcatttactgtcactgttcatggacattccttgtctgaagacttattatgtggtagaactgcggggttgcacagaactcccgttttacctggtcaaaccgtgggcagtgtttttctgtagcggtcacgcccttcatggtccccctagtgatgcctgtgacttctcagtctcatcagctctggggagtcctcttgtgtttgagcctggtcatcccagggagactgaggttgtagcttgttattttgattcatgtttacccccaccccccactcactctcgtcagcatctccttggtgcttagtgggtcttcatacatcttctggagggaacatgtctctttcaggcaccttactcactcttcaccaaggttttctctttttaactattgtctgaaaacctcctgtttctaagccataactttctgttagaaatgaaaactttttggctgtgaagcttcatgttaggctggccccagggacaccatcagccactgcatcagggagcactggcttgccgtctactgcagaaagtgctgagtgctcctggggcagaaagcttatggggtgaggtcactctttctggcatctgggactcaccttgtttcaccacattaaccagagttagctgtttgtggtgaggtcttggaagataatggccaggctgttctctttcttcatggatcatgtaatccaaatatctatgctaccgcaatctgtcttctcctgtgcatcctcctggagaggggggcagatgccaaagttcagagataacttcacatctggtccatgtggctgcctgggtagggatgtgactcaggatgtcttccccactgctctgtccatctctcatgtccttctttcccatactgtattccttccttctttatatccatctttatatcctacagtcttctccttctttcatccattcctccatccatcacatccatctatccatccatctgtacatccatccactcgttcatctactcagctactcatcaatttattcatctgtccatgtatctatctatctatccatccatccatccatccatccatccatccatccatttgtccatccatctatccactcattcatctactcagctactcatccattcattcatctgtctacctatctgtccatccatccacccacccatccatccacctatttgtccatccatccatccatacatacatatatacatacatccacctatttgtccactcatccatccatcatccacccaccccttctcccctccctttttccatattccttcactcatctttctccccttttccttcttttctcaccttccctctcatctcattcttctatccctccctctctccctctctattttcttctcattcattgcaccccctttcttctccttccccctttccctcctttcctttcttctatctgcctgtccgacagtcacctgcacacatcctgcttttgtgactgtggattggtaaccacaccacttctagcacctcagagctgctagttggagcaagacaaggacacctgtcttgcttgggttggtgagacctcagtaccctgggctcctgtgtttgggggtggagggatgctcacagctttatgcgcaggggtttgcctgtgtcctcttcccttgccaaggctggtagatagtagagagtgttctgggcattttaggtaaagtctggcctggtttcaatgctcagcttcttccttggctttctgcatggctctgtgtccattggacatagcgagagtacagccgtgctcaggacaggaaacagcgcacaatattgtctgggccaagcatgctactttataggtcctcatggttgcatgtggccttctgagaaggggtcagggttctctctccattgtccaggtaggaaactgaagcccaaagagggaatttccttcctgatgactcaagtcccatctttctgtccccagtagctatgacctggccttggtttatgtgccttcttaaatccccactgctggacacctgtgggcagtgttaatactggttctgatttctagtttttccagccctaggcagggatgttactggatgaaggcttttgtaagggtgagtacctatctgaaccttgcagcaggcccctgaagggacagtaggtaggattggctcctgccacaggggcactgtgagaggtggctgggcagtgagcatgtcttttttttttttttttttttttttttttttttaagatgacctagagccctccaagattggtggtttgcaagtaggcttttcagcagccaccagagggcgctcagacccatgctgggctgatgggagtgtggggctgtagataggaaggctttgagagaccagctccttggggaagggagacgcttctcaaccagtgtttgaggtgtgttttgtgccactgagtaccaagccaggggcttttgccctcggggagccagcagttaggagtgggaggcggggaatcagaatgtggtgtaatatccctagactacagccatgttcagaatactcacttaggcagcacctactgtgtgccaggcagctcacataagcagcacctactgtgtgccaggcaactcacataaggaacacctactgtgtgccaggcagctccataagcagctcctactgtgtgccaggcaagtcacataaggagtacctactatgtgccaggcgccaagccagttgccaaggatagaatcatgaaaaatctagggtcactgccatcaagacccacaccctgctggggagattacaagtgtggggaaaattggaaaatatgatcatatggacatgaaacaacaagaaaatgaggaaaccgctagcttaggctggtgggggtgggggatctggaaggagacacacaagaactgagttatcaagacagagatcaaagagagtgagcagaggtgagacctcttggctgtgaagacagaagggtcaaaggtgagaaggctactggcccggggtatatggggaggggaggatggctatcgggagccgtggttgggggctggggattaggatagagaaagtgaggttgtctcagagagttaggagaagatgttacagatatggtcacttttgaactggaccgtgaagtatgtgtaggagtttgccaagcaggggaggcagcaaaataacatgagtgcagtccctagggtgactggcctgagggtggcatggacggtctggacaaagtggcaatgaggccttgggagctgcttctgccaggttctccctcatcttatttgctccagtgtccccctcacacagagaatggtggtgggatgttctgcctaaagtgacttcaatggttaaatgaggggaccctcctaaagtccttgattttgtctctggggtggagctagcgcttagttccgactcgtggtgacagctcccgctgtcactgatgctgttaatattcccaacctcctgattggtaaagggcgggtttccagacaccggtgtcctgtgagacgcccccgtttagctcccaggaaagcacagacagcactagaccggaaccctgggcctttaatacttctgcctcatctcggtcccagtgtgaggactctcactggaaattgaataactttacctcccagtgatctgtttacaaggaagagggccaggaaaaaaagagagagagaataataataaaaacgaaacaccctgaagacctggttttctcttctctgttgcttattcaggacagagctttgttccatagtttaggctgacttctgggtcagcatcctcctgcctcagactctggagtgctgggattatcaaagtacaccaaccacactagccaagccctggattttatgtcaggattcaaccacccataactgctaaggccctcaccttacttattttttttaacattaaacacacacattttatagttatttttattgttttttattttattgctgtgatgaaacaccaggaccaaaagcaacctgggaaggaaagggttaactttcgctcacacttaaatggaacatggttcatcatggagggaagttggggcaggaacctagaggcaggaggtgatacaggggccatggagggatgctgctcactggcttgctccccatggcttgctcagcctgctttcttatagaacccaggaccacctgcccagggatggccccgcccacactgggggctgggctatcaatcaagaaaacgtaccttaggcttgcccacaggccaatcttgtggggacattttctcaactgagatttttctctttctaaatgatggtagatcctgtcaagttgacataaaaccttccaccaagatggtgctgatacaatattactcgaaagacagttaacattagtctcaagtcagtgtcacgtgatcatgtggtggtgggaagaccgcttactggcaggaacgttctagaagactaagaaacgcccagttacattccatcaggcttggcctcagtatacgttgtgcttgtgtttgacaaagcaccgctgttgccaggtgggcgccatttgtattgacggtgtagacggcccagacagatccatttttcttgtctcctcgttctgcttcctttgcagagccaagaagaagagcaaacccttgaacctcaagatccacagcggtgtgggcagctgcgagaacatccccgcccagcaacgctctccgctcctgtccgagcgctccttgcggtccttctttgtgggccacgggcccttcctgccctccaccccacctgtccacactgaagccaatttctctgcaagtaagtccctgctggccccctggcgacatcggctgggggtgcacggtgtttgtgccatttatcctgcttctgaatctcacaggtcaagaggcagccattgcttgccacctccctcttacctgcacagctgctgggtctttagatggttttgaaggggttgtgaatggtacttgctgatgatgggctgtcatacagcctctgtatcctcttcggctagctgatgtgaaggaaggacagctgagagccaagttggggatatcagaatggcacccatgttttctctctttgctccctaccacctctcaagtgcttgtcttggggtttctctgtcaatgtggggtctgggatgatgtcatgcatgttttattggctggggctaacatgtaacatataacatatagcgtataacttttgcatttctgccatgcataggggttcaagccaggttaagtgcagtctaggatttatagtccatgtccactaattgctgccagaggcatggtgcttgtgactcaagtagaaacaggaattcgtggtggccaaggtctgagtttccagaaagttccgatcttagccagaggcatgatctgctaaacgggtgtagatgtgggcagaggggaaccctgaagtgagcccagctgctcctgcaccaggatggcatggtcaggggatgtgggatgctggctttcataggcactgtctcctgctccttagcattgccctagattgcctgtactatcctgttgatctggagagtaagagtagtaagaggagttgcctgagcaccaggccaatcgctgcctctggtacattgcagatagatgattgtaaatggggtaaatggtgtaaatggggacactagagaactccctcaaagtcacaccattacctagtagttgagccagaatttgaattggatccctcctttcctctctccctcccttccccctcatcctcattttctccctctctacttctacagaactctgtgtgtgtgtgtgtgtgtgtgtgtgtgtgtgtagacagggtctcactatgcagccctggctatcctggaacttgctgtgtagaccaggctggcctggaactcacagagatctaatctggcttcaccccacccccccccacacacacccacacatccctaccccgctacctcccaggcatggaacccaggtccttgtccacattagccaggaactctgctaccgagactgcatctcactaaattgttcaacacactctacagcctctgctatctcctgccttagcctcctgggtagccaaggtcccaagcctgcacactggatcccttcaagattcatatagaatgatgaagagagcctgtgggcagctgaggctctcctccagaaggacacatgcagatatcaataggaaaatattctggtttatggcttcatcctagcgcctgggctgctcgggccctgcctcaaatccactaagatgccccaggatggacaggtcagcagcagaaggccagctgattaatttatcaagggaaatcactgtctgagaagccagagatggtggtacgtgtggtggatctgcatggtagtcagagtgttgcttggtgagtggtgacaagggaaggggaccatggcccatagatcaaacaactggagcagtagttgagacacctgtcctggcaagaaatgtggactctggaggaaaggagtacctgggtttgagtcatggcattgagtactgcagaactcagataagcttagagtctagtctaatgggctaagaggttcttagttgaacttcacttactttgtctgtaaaatgggccaattattcattaattgccatacgcatagtatggatgatccctttgtacagggcctgtacacaataggtacttaatcatgatgcctgtttctctagcagtcctgcctcatggttaattatggctgttgactcatggtccctcggtacccacgtcacttcccttcagccctaagaggcttggaatttaccttggcatcaggctgatggcaggcagcctcctgcatccatctgtccttgggcctcagtgtcttctgagtgaatgtcatcgcgtccccttctgaacggctgactgtggctctgatctatgcttctgaccagagtgaaaacatctatctacttaaaacaaaaaacaaacaaacaaacaaaaaaactatgggctggcatttttgggtcattttttctcatcccaccacagtccctcaaattcccctttccccttgtatccaccaaagagggagacaggcctgtctactcacctgaggtcagtgacagcaaaagactgttaagaggcagctcagagataagcatgatgatgtgcatgcctgtaatctcagcactcgggagtctaaggcaggaggatccagagttgaagggcagcctgggctacattacaagttctagtcttgcctgggcaacatagcaagttctaggctagtccaggctatatagtaagttctaggctagcccaggctacatagcaagttctaggctagcccaggctatatagtaagttctaggctagcctgggctatatagcaagttctaagctagcccaagctatatagtgagttctaggctagcttgggctgtagactaagacctaaaaggcagcccttcagagcacggctgccctttggatgatcctggtgtttgtactcagaagctgttgtctgacctcccaggaagaaacaagacaagcctggtctctgggagagtaagtctcatggagtgtgtggtctgcccttcagcttccctttcaatgaggccccaggttagcctgcattctgtatttcccaggagttttctctttctatctgggtctcagtttccccaactacccactaagagactcgagacaaatacccgactcatttagaacacactggggtcagagaactcagttgccaggcgccggttcccactttctcttcatggtcctcagttttcccatcaccccctgcttctgggctttgttcctgcagagccatcccagagagtccctggggccatgtccttgagacccatggggtttccactagtcactatccgttctggtcccggtgtgtaagttccaggaaggtgccgtaccatcttcatatccctggggatgccgggcagagctggctggagtggtggggcctgaggaccccagggtatccaccctcacatggatacagaaagtcctctccctaagtgcttaccctactcctttgatgtcagggtgaccaacaggacaaaggagggcatgagagtttcagctggtggagtaaggtttgccaaccaaccgtgttcacaggttggctcagatatgacaaaatgcaagacgtcattctcccatgcctccgcttaccctgatactgctataccaagtgtgagttgagcacaccaggagttgaaaggtatcagatagaggaaatgtactgagtcccacagcttagcagctggaattgtgcccagacctgtctcagggagcattgtccaggcatcccccaaagatgctgcatccagcatgccttaatgtgctagaatacacccatcagcctgaagatggcaaactcttagaacccaagcttatgctttctgttgtgtagctttcctgggaatgaaagcacggtgagtaggctgtgtgaacatgtcccccccctccccgccactccccgtcccctgctgccctctgacctgtgaagtatcacatgtcaggggcatcctgtgtccttcctgtgttgctcaggcatgtctgactgggactcctcctgtggtggtctgtatatgctcagggagtgatgtgattagaaggtgtggcccggtggcagtagtgtggccttgttggagtgggcatggccttgttggacaaggcatggtcttgttggagtaagtgtgtcaccatgggtgtgggctatgagaccctcatcctagctgcctggaagttagtcttctcctagcggccttcagatgaagatatagaactctcagctcctcctgcaccatgcctgcctggatgctgccatgttcctgccttgatgataatggactgaacctctgtacctgtaagccagaccaaattacatgttgtccttataagtaagagtttccttggtcatggtatctgttcactgcagtaaaaccctaactaagacagctccacacacctgggttttttttgtttttgtttttgttttttgttttttgtttttttttttttgttttttaagcccagcaagccacaaacatgtggctctttgtagaattgtctccaaccccagctgctgtagaagaggctatttctaaatatccttaaaactctatttcagagtgagtatgctccacctaccaggatgtagagaaggtagggtcagggctagtacttagagctctgtgtcttggtaaggggaattcttgaagctgtttgcacgtatggttggatgagggtgatttgtaaaccttgacagtggtgataatactaacagccattggtgttcactgtgccttgacagcatcatgagcctgtccaaaggccctccccctgtgtcgttcatgtgtcatgatcttctagaacgttgagactttcatcatccactttttagagatgaagaaacgaggctgaggttgaggacctggccaaaggtcataaggtcatgaaagcagagaaggaccaagccattttgcaaggccaccttccttaccctcgtgcctctgttttttgtttttgtttttttcctggtttggagaactatcaggtagttttgtggaagatgtcagcactctgtatcccccacgtgttagcccactccctaccccctgggctctgctgttaatattcaccgcatcgatgggcccaggtggtggccaaatctgatgggggtaagcagctgcagagagtggctcctggcagcttctgtgactcactcatcatgactgtcccctgttgaagctgaggaatgatctagtactcccaaagagctctggggggttccatgttagcttcctgtgaccctcccagtcttttagggcaacaaggggctataactctgtgacttccctaccatgatcatcatggcggcagctggaatcattccccttcagttgatcccttagaagatgctataccccatctgggatgtccctccagcctctatgggcatcaccacttctatatgcagttcctatcccttgtcctggaaacaaggagaggagttgaccaccagccaagaactcgaccttgtgtgtacctggaggctgagtcagatccgggtgtgacagggggcggctatagcaggtggcagtgaaggtgacgaagctgaaccgccggccatgttcccaccaaggcaactgctggggttataaagatacccgggatggggctgattatataatggggtttaatgaggcttgaagccaaggctcattacccctagaggagggggaggagacgtgcgcatctctgtagaagctggcagcctgaaccggaggcgcatcttacaaccgggaccgatcatcctactgtggggagatcctggctcaggggaggcaactgcaatagggaacatatacccatagggctgacccgaagggtgctgcttactgggaaggattaagtggtggtgctgacgttgatgcctgggtcctgtccttgtgctggcccgtcagacccaggacttgcttggcatctagttcagaattccaggctctgaggcgtccattgtgtgaattccctggtccattccgcaaggcgcaggggtgtctgctttgtaggcatgaaaagttgtccacttcaggataaaatgatgcatagctgtccgtcacataaagccctgcttgctgcagctaccacttgctccatcctgtctctgcctctgtctttgtctgtctctgtgtctctctgtgtctctctctgtcgctctctgtctttctctctgtgtctctctctctctgtgtctctgtctctctctgtctctctgtctctgtctctgtctctctctctctctctgtccctcagtgcctctccttgtttccaggacaagggataggaactacatatagaagtggtgatgcccatagaggctggagggacatcccagatggggtatagcatcttctaagggatcaactgaaggggaatgattccagctgccaacatgatgatcatggtagggaagtcacagagttatagccccttgttgccctaaaaggctgggagggtcacaggcagctaacatggaaccccccagagctctttgggattgctagatcattcctcagcttcaacagggaacagtcaggatgagtgagtcacagaagctgccaggagccactctctgcagctacctacccccatcagatttggccaccacctgggcccatccatcgttgcggtgaataccatactctccgtggtcagtttaaccttagtgatggacagggcttctatcttcaaagtgcgtcctagatggcccccaccatcaagagccacacataaacatatggtagaaatataaatataaatggtttatgggttcaggggctcacacctgtcacctctatactgggggggggcagaggcaggaggacccagaatttgagaccagtctaatctccttagctagactctcttgcccaaacaaacacatgtaaactctttctgttgtcccttacccattgaatgggggggggggaccagggaagggggtctccctacctgagttttcacaaaccctacccctactcagcaggttcagcaagtcagaatacctgggcactttacattttgaaataccgtcctccccaattcaactgagggcaaaagtatttaagtcatcgactgatcctctctgagctggcccgctttttgcttttcagtttttttcttaaacagtatggtgtaatgcctctttcacacacttggattctctgcttggtagtgttgtaagcagccagagctaatggaacatctccaggaaggtgtacacggaccctgggcaagcattggtaattttggtacccacaggttttgattccctgggctgggatgttctgtggatatcgaggggggaagttgagcttcaaacacacagaaaagttgctggggagatgctgagagcttctaagtcccatctatcataatcatttctttgtatttggtctcccttcttcctctccctttcagaactgcccagtgcagtaaccttgactctgcatgggtcttttcagccagcctcaccccattctcagcaactgccccaactgcggtctccctcattgtttcctgcgggcgtaggatccaatccagcattggcctagatgtctcttaccactctttgcctgtttgtgacgctggcatctctgcacaggaacacagtggtgctgcacagtgtccctcagtggggtcccttgtgctgggggcctcagctgtcttcaggggaaaggatacctgaggaggtgatgttgtgacctgcctatggcactgtagatctctaggaatccccacagcttgagagagaactgcctaccacagggtgtcctctaactccaatagtggtagtagatgcacacccaactctttgaaccctccacccaaataaagaaggtgtaataggacaaaaaagttaaaacaaagtcccagccagggccagcaagatggctcggtgggtaaaaaacacttaccacacaagcctgctgacccaagtttgatccccgggacccttacaaaaatctgggtgtggtggtggccatctgcaatcccagcatgcctttttgaagatgggaacttgagacatgagacttgccagccagcctggagtatacactggggcagaaacacaagaccctgctcccagaaggtggaaagagaggttgattccctaaagttgtctcctgaccctgtgcttgtaggtacctgtgctggactctccaactgaccctttcataacaaataaacaaatattccggccaccgatgataaaggtatttctacccagcatgagcagacgtatcataaatgcaggcctgcaagctgcatttgagctgtgggtgacctgggggctctcactgattatatatgtatgtatgtatgtatgtatgtatgtatgtatgtatgtattttcgagacagggtttctctgtatagccctggctgtcttggaactcactttgtagaccaggctggcctcgaactcagaaatccgcctgcctctgcctcccaagtgctgggattaaaggcgtgcgccaccacgcatttatttatttttaagcctgtgttcatgtatcatctgcatcagaaagtaccaagtccagttcttcaatttgccgacaaggaaactgaagctggaaagtagaactaaggccagacagtaggaaggactgcccagggtgacccggatgaggctggagcatgctgctcctgatgcccatctatgaatattcctccagaaaggttgaccagcatctgcgtctaccaacgtgcaaaatgtttaacagtgaggcagtaggaactcaccaaagacatggggcctctgcttagccagtaaggcattttgctgtgttcagggctgctgctgcttctgctgctgtgtgcgtgtgtgcgtgcatgagagagacagagatagagagacagagacagagacaaagagaaacggacacacagagtgagcgagacagacagacagacacacacacacacacacagaggcaggcatacagacagacagatacacatacagagagagagagagagagagagagagagaacgcacatctcctgcaaggccacttcctagttcttattaactctcttccccttaccttgtctgcccacaaactttgcaatccttgcccccgcacacagtttgggctcagcatgaggctgacattctcagaccttctgttatgattgctcccaccaggaaccgtagcaaccaaaattggttggtaagtggtcggtgctgggaggcaagggtgtcatttgcatctactggatgagtccatcctggttctggttcaagtgcaggctgccagagtgggcacttgtgcccctgctaccacagcctagggtctgaatgtcaccaccttggacccagtaatctcccaggttactgggggatgactcagacccgactccgtttattaaaaaaagtacccagatctaagactctgcgatgcaccccagacattgataagccttctccacgtccatgttctgtgagtgatgggccagacttcaagagagatttgtgcctgcatgatatatgatagaacagaggctggagacgatgagcgcctaaagctccacgttttgtgggctttttgtactttgagctgtctgtctgtctgtgtctgtctctgtttctgactttctgtgtttgttgctcatgggcactgtgcatgtgtgtacatttgcagtggtatggatgctgtatgggtacagagcgggaagacaaccttgatggttgatgctccagcatcctgcatcttttgtttggaggcagggtctttcattcacctggatccttaccactccggccaggctagctggagggcaagcgcccaagggtctcaccagcactgggaccataggtgtgcatccctgtgttcaggttctcgggatctgagctcgggtcatctacctgcctctgcctcttcagtgctggggataaagatgtgcgccacccaactttatatagtttttttgttttaagtttttaagaagtagtagaagggaatttggacatagaaaaacccaggaagcagaaccacagaggtcctagcacccaagggtcactgaggattcctggccactatcaggatccagagggaatgccggacactgtatccatggtccctgcagggtcccatctcttgacacctagaagaacagagtagtccagcctccaaccaccccagaagattcagtcccagtgcttccagccctccagttgggggcatgacctgtggcaggccctgaaggctgtaaaaagcttctgctctgccccagtgacttgactaccaggctacggagccagcattccaggggccctgcagctggctggggagccaatgaggcaccactggggggagtgacgtagctcttctcagctgtgaaattgatcggcagtcattaagttccagtgatcacctcccacacggccccctagtgaccataaagagttaaatgcagcttctggaggtgccccttagctctctgggcagcagtttgctggggaagggagggaggggaaggcttctggccgaggagggggctggaaccagttagtcacatcatttgcagcctggccttggccacacaaacctctagtgcctgtcatgccaaggaaacagactctctttggattaggccattttcccagttaaaagggtctcagtggggccatagctcagttggtagatcacctacctagcaagcagaaggtctttggctcagtccccagcaccttttgaatggatatggtggtgtgcaccgataatcccagcactagggaagtaggcgtgggagtgtccgaaactcaaggtcatccctagctacatagagtttgaggctagcctgggctatgtgagactctctcaaaaaaatggggttcaccagaacgcctttgactttgtcttgctgacacattttccaaattaggaatacactcagtaagttcttgatttgaaaaggctgcctgtcaggtgggctaggatgctgtgtgagtgttaaagggatccacccctccccgcccgccctcaacaatggatgacaagagtttgattctccttggaaatctcctgcagctgaggccagagacgccagatccctggggctggagttatggacagtggtaaaggaaccctttgaaagtcagctctccggatctgcggacctcggtgaccaggcttgcctccaggtgtctttacctactgagctatgtcactggcacgtatagaaacactttaataacatacttacaatgatctggtggggcaaactccacgggccagtcagctgttggggagggaggtgaataccattttatttgaagcaggtctgagacttgagaatggtaggtgagtgggtcaagtgcaaggctgactcctgtcttttgagacttggttctctgtgagttttctttgtttagacatctaccccctggttatccaagattcggtattaggaggagctggatggagggtgttagagaatcctagcgtatctttgtaatatatgcctctccctctttctctctccctctccctctccccctctctctcccctcctctctctaatcgcaccaacgagaagagagtgaatccatgggttctgtttgttgcagtctgaaatgatatttaagttctaggtcgcttgtcttttagattgctcacagttttaatcacttcgaaaccatctgtctcctctcattacatagtgttttcttcctgccctgctttgtggcagtggcccccaaggcgcatgcgttaaaggcttcaccctcaaggtggcgctgttgggagttagtggaacctctgggaggcggagcctagtgggaagtctttaggctatagtggggagctgagggtcggggtgggggtgggggtgggggtgggggtgaaaagtgggtgtgattagggggatgttcccttgatggagccacagtctcttcttttattttcagttgtcttaaggctggtttgtgacactttccttgtaatagcacaagaattacgaattgatcactgatccttcactaatccaggagctcctggtcagggcagggctgctgtctctgttactcttctcattggtgagacgaagtgcctgaaagggagggttttacttgggttcaccgtttgaagatacacactcctttgtggtggagaagccatggcggcagaagcacggggcagctggcatttttgcgcccacagtcaggaagcagagagggaagaaggagtggcctcatctcaagttctcttcatcatccacctggctcctcagcccatagcacgggctgtgaacatttaggacgactgcatgttttagtgtcctcagtctcgaaactgaatacacatgaccagtgatttgaaatcccttcaagttgacagccaagagcctaaactctgaactgagatgggaggagcatcatgggacaccttacagggaagaacatgaggtacctcaaaaaagaaacctttcctccagagagggaacgggtttgatgcactacagcaacggcagaagcagagagatatgttctcatcaacccagccaatgtttcccgtagccgagaaacaaaggcagattttggacatcaaaatacacccaaatgatgctgggtctcttggaagagctgtcccaactgaggacagagggatgaccctttactttgtggcatacatcttacagggctcaatatgaattgagcctgctgaacaatgctcttgatagatagctggcccctctctaattgccgacaaaagtcaaaggttactgaacagctaaaaataaatatatttttcttaagtctgacagatatctgaccccttcaagactcaacttttcactaataatctttcatactgtatgtgccagcgagcctcgctgtaaccatgacaacacacgggcgaggggttactcgggagtgaaaggggtattcccactcatggcttcagaggtatcggttaaggccagcagtccttgctgctgcttccgggctgtaccgaggcaaagcatcatgggaggtgggaggggcagggcagtgagctcacctcatgtgtgtgagttactgtcttatcgctgtaaagaacgtctgacaggatgttcctaaggcaggagagggttatttagctcatggttcgagggggtggtccatcttggtggtggagagcatgaggtgggagccggaggtagctgatcacgttgtagtcaaccgccggaagccagagaggtggcaatgctcagcccactatgtcttcccttctctccatcttattaagtctggtaccccagcccatgggatgatgctaggcacattcagggaacattttccctcctcactgaagcctctttgtaaacagcctctcagacttgcccaaaggcgtgtctcctaggtgattccaaattcactcctgttgacagtaaagatggagaccacaccccagcatccgggaatcagagagacagggagtgtgtctgtctcagttggctttctcttctccatctttcattgaacccgagcccccagactgcaggctattgccacaggtctttcccttgtggctaacctctgcagatatcatcccctccccctggccgcccccagaaaaacattctcactcatctctcaatgaaaacaggcccacggcagcatgaggcaatgtgctgtatccatccaccggctccagccatgattttccactggcttattactgcaggcataacaagaagctaccccctcaaaacaaatattttatggattatcttttccagtaaatgataataacagttcagatcttgaatattgcctttgggttaaaatgattctatttcttttgcatattatctcatttgatagataatgataatagtttccatcctaatgaaggcttcctggtccttgtggatgggtgtatggcagtcattggggctttgcttgggtcccggttgctaatgagcacttagcatgcttgaggaggagtgggctgaagattatctaacgtattatcataatgtttagcatactggaatagagtcggagagaaataattaggcgtggccaatgtagatgaaagccgagccctttgttcctgatgaagaataaactcagttaataataatcatacaaaggactcttgaagtccatttctgtccacagcaaaagagtcttcggcaatttgcaaatatagaaatagagatcagaccatcacattgaggctatatggctgtcttggttagagttttactgctgtgaacggacaccttggccaaggcaactcttataaggacaacatttatttggggctggcatacaggttcagaggttcagtccattatcatcaaggcaggagcatggcagcatccaggcaggcgtgttgcaggaggagctgacagttctacaacttcatctgaaggctgctaggataatactggcttccagacagctaggatgagggttttaaagcccacacccacagtgacacacctactccaacaagaccatgcccactccaacagggccacacctactccaacgaggccacacctactccaacaagaccacacctcctccaacagggtcacatcttctaatagtgccactgcctgggccaagcatatacagaccatcacaatggcattgaaaatggaatcacaggctggagagatgtctcagtcaataaataccaagtagccctcaatgatattatcttatacaagcacaggacattactgaaaccaggaaaatgatatttatataacactatgagctggaccagagaaggaccaacctgttttctatgcttcttcatgcatttccttgtagcctgtgtggaagtagctctctttgtccccattgtgcagatgaggagactgaggacagagaagtccagtgcccaccctaagagtatgcagctgataaatagcagctgataggtagcaattctgatacagacccggaattgactccagacctgaggctcctagctcccttctccatagcccccaaattcagacacacaaattcctggaggcagagacgggagcttcccacagcaatgttctgataccaggatgccactgcatagtccaggtttgtgtttgtggaccgaacacgtaatgagggtcgatgggcgagactggaccggacttgctgtccagaacttgctctgaagtccaaattctaaaaacaagcctacccttcaagcccttgctattgaccatattgctggggaaagaaagaatccatctttctaagaagctcaggcaagtgtaaacacccacggtggccgctccacacacacttttgcattgggaacgtttctctaatttcttcatttttcctccctttggtctgctatgatctacaggcacaaccaatgagcaaaaaagagtaggtcattcttaaatggtgcctgtagagaacagggtctcatgtagcccaggatagcctcaaattctgtggcttgtagcccaggctagtctcaaattctgtggtcaaagatgaccttgaactttcaactctacagccttcacattccaagtgctggtgttatggatgtgcactgcacacctggtttctgtggttctggggctcgaacccagggcttcacaatgctatataagcactctgccaactgagctgcatcccagctcccccaaacccaacccaaacctaagttttgtccacctgtgataggtcaggtcctgtgttcagcacccagggtttaggacttgactgtctctcgggaagctcatgtaggatggggatggggtgggagactggtttgtaaagaggaaaagcttttagatatgggctccagtctcagtgccctttcctttgaccatctaattcacatgaagcaagtctcttaacctctccagtcctcaattttctcatctctggagtgaggataagaacacccacggtgcagatccactgtgataaataaaaggagacagacataaaacaccgccgactgaacgattctgcttgcacgagatgctcagagaagatgaaatagggaaagacggagcagagaagagtcgctgagggctgagaacagtgaatctcgtgggggtgtctttctgaggtgatggaatgttctctaattgccatgcgataacggccttaattttgtccattttcttaaagtcatggaattatattgtacactgggaatgagcgaattctagtatatgtcaattataccttgtcttagttagggttttacagctgtgaacaaacaccatgaccaaggtaactcttataaggacaacatttaattggagctggcttacaggttcagaggttcattccattatcatcaaggccggagcatagcagcatccaagcaggcatggtgcgggaggagctgagcgttctacatcttcatctgaaggctgctagcagaagaccaaattccagggagctaggttgaaggtcttaagaccatgcccacaatggcacatctactccaacaataccacacccacttcaacaagacaacactcctaatagtgccactccctgggctaagcatatacaaatcatcacatgtctcaatagaacttctttatcatcatcatcatcattttgttgttgttgttgttttttttcaagacagagtttctctgtgtagccctggctgtcctggaactcactctgtagaccaggctggcctcaatctcagaaattcacctgcctctgcctcccaagggctgggattaaaggcgtgcaacaccaccattgccaggcaaaacttcttttttagtagataaaatgatccactccagggttcaggtgagatggtgaatagttatcactgaagacaggcctgcatgccagacatattcatactgtcaggatttttttaaaaaatggaagtcccactcagtgcagtgcctcctccatgggtcagagtgctccctgtccaagcctgatgcctgagttcaatacccagatcttaagaggcaaggagagaaccagcttttcagagttgccctctgacctccccatggccacacagtggcatcagccactactccctgcccccaaataaataatttaaaagatggaacttgctcacaactggggcatctgtccttccgcctggagcccagagagcagcaaggaagaggggagagaaagatcgtaaggggctgaactggatcgaatgtcgccgatgtggtgtccttctgagtcagacatggctgtcacactcatgagctcacggcaaccttggctggctgcataagacctgtgcaggatcgtgtgaaggagcagcctgactccatgttaagaatgttgccatgagatcaagataaattcgtctctctttactgtagaactccggtttgatgggctttaatctgttactggaattggacacgctccactggattacatagtctggattttgtcctgagaagatgaggtgaagttctgctgaacaaatcttgaggtgttcagtggagatgttcaagtaatcttgtctgctgtctagtcctgtgatttttgtctgacaaaccggcacgttaccaaattcatctcaaaatcccctgtctgtacctttttctcctaaatgaggaggcctgaaaaaaaaatcatccccactgctcaaatcccactttggagagtcagtcttacgcacaggagagctctgggcagtcttatgcatgtgagagctgtgcacacttgatggctgttggaggaagaaggagaatgggtttccttctgtgctgtggcccatggtaggttacccgtgctccagtggatggtaccctacactcaggaacatacaagcagcatagtttggactcagtaagttatgaaaaaggaggaggagaggaagaagaagaagaaaagaagggcatgaaggtggtgttgggaggaggttgtgatgctgaggtccaggaagagtgggcagatatgatcttatcccgcattcgtggatgggattactaagtcatgtctgatgctggggagagcatatcctagggtgttggcttggcagccttgcacacagtactgtagtctttctcaaacacgcataacaagtttcttgaagggaggctccaaggttcccaaggttttcctagcatcccacaagaatgcctgcttttagaatgccatggcgagttatactgctgtcaagaagaacttgggaatgtggtaccaaaatattgttttaaaacttgttagaaggcatcagcaaggtaccaagttagagcttgagcttgagtagctgtcatcctagaaagaacagaggtcctaaggtgaattcagagctcaatgttacttttccactgaggctgttactaattccaaaatggctgccagaagtctatgctagttccaaaaatggcctccgggagtcattgctaattccaatatggcagccaagagtctaagaagctgaagagaactttctattgtgttgctaggggaataatggatcccaagatttacaaagcagaaggaggcccttataaatgctgctgtgtgcagcagggacccgagggattgtattctgcacataaggctaaactagaaataaatcattgtttataaaaataaatcctagcatcagatctgccccaaacctgactggattaatgtgaccaacctcccggatgcctgccagaagagaaaattaagttctccctagagagaggtgacatcactaagcaactccaattgtctcctctaattttaggaattcagtaaaaatttaccagacatattaggagacaaaaatcatatgactgaaaaccaggaaaggaaaagaaaaaacccaaacaccctcctcaaaaaaaaaaaaaaaaacaaaaaaaacaaaaaacaaaaacccagaccctgaggagagccagatatttaatttaccaaatacagactttttgactttaccatgatttaatccagtttgaattcttatgtcctgggatttgccagcattagcagctatctcccagtgggctcaatttagtttttgttttgtttttaataaccagtgttttgagataaaatagatggcacgtatttaaaatatattgtttggtggatagttctgtatgaatgccacagcaatggccatacagtccccacccccagagttctcattctcgctaccttgtgtcccctttacccttctgaaaccatgagccatctggcttctgtctagaagtacatagaaacagatgaagtcatttttttccctctgatatctggcttctgtcactctgtcctgttgaaatgtgtgccttcttggtgggctctcatcttagttgtttacattttactgtgagacgttaaatctctatgagctatgcaggagacttcacaggaagatggagactttgcacagagatcagggacccatgcaaaacaaggatgggctctctaacaatcacaacggcaataccggaagctggtaataagacacgggtttgattacagactggatacgggtgaaaggatcagtaaactggaagagtggttagaagaaaatatccacattgaagcagagagtggcaggttatggaaaatgctatagagtttctacaggatgcttgtgggggggtttggggttggcacagacttgtgtttgagattccaggggcaaaataaagaggcaaaggaaaatctgaggagataataactaagaatttctgagagtgggcttcaagaagtgggtgagggtctgagttgggatctcaggcacccgggtaaatgccaggtggttgtggcatgaagtctgcaatgccaaggcatggggatgcctggataggttggctaacttgacgaggtgaaccgctgagctctgggttcacgtgagagacccaatacagtcgataaggtggagagcagttgaggagacattggatgccaacctctgccctccacgtgcatataatacatgcacgttcacccacacactcgtcacacgcgtatgaggaaatacacaacaaagacgaatcttgaacttcaatgtgaatacaaaggcaaccacacagaggcagacgattcttagtcaggctggtagtgctgctggcctacaaataattcctcaatcaagtatggccccgggcctactttcagtgtttttacgtttgaatgaatgaatgaatgaggaatgaatgacaagcaggaagaagaaaaagatggctgaattggaagggtgtgacaccagctgctcctgagggagctggtgggcttgccctagcagttaagggagtaaagaaaaccagagaggacattgtatttcattggactgagatacaatgttcctaaagatttcatccaacaccctggtgccaggaacctgggctggcaacattgttgttctgaccgggcacagtggccctctccagctagtctttaatagtggggtgttctgggagtgggggcctgtactctgggaagaggtttcctgctttagccaggggcaagagctaatagggtatattcaggtgagaatgttagctctctgatagtaccctgcacacatagtaaaagaaaaaaggacccttaacatcccaaggcctttgaagttctgtatttcttatgtatacagagaaagtgacctaaattgtttcaccacaggaacacaggaatgaaggttttctatggaaagtgaaggctggaaattccttcgcctcttctcagttttgctttaatgtgtgtgtgtgtgtgtgtgtgtgtgtgtgtgtgtgtgtgtgtgtgtgtgtgtgtgtgtgtgtatgtgtgtgtgtgtgtgtgtgtgtgtgtgtgagagagagagagagagagagagagagagagagcaagcatatactggcagaggacaaccttggtatctatctgtcttcatctctcatcttgtttgggacagggccccatgctcactgctgtagaggcagatggcctgtgaacatccaggattcttctgtctctacccctaccccttctgagctgaggaccgaaccccagggtcttgtgcttgcttggctaaatccccagccccaacttcgaaagtctccacgggaatgttggagttacagacatttttgctcctgtatctgactttacataggttctgaggatctgcagctaggtcctgaaatttgccaagcaaatgtgtttatccattaaagcatctctcttaggcctattctcatttaactcatttccgtccctccccctttccctaaattcatccatttactgagtcaccattttaaaacattttaattaactgtactgggtactacctgttccttctctttaaacactgcccgtattacctgctgtgtaacaaactgcagtcacactttgttagatggcaggggtatgttctgagacacatggcattaagcaattgtgttgttgctggaacattgtagagcgtatgtacccaaaagtaaggtacctgtgatgttagcaaatgctgtcatttcatgaggccactgtcatatatccaatgttgacctaagtgccattaagcaatgtgattgtgcctcaaagtttaatggcttaaaacagcaagaagggactggggatatagcttagggtagaacacttgcctagcatgtgaggagtcctagattcaatccccaaccctgacataaaccaaaaattaaaacgtgtgaatatttgtcaccccagaagatctacgggttatgaattttagggtagagtagctggatagcttggatactggtctctcgtggaggtgccatctggatgtgggcagggctgtgttctgatctgaaagcttggccataatggaagggtgcactttcaagatgtcctcccatggctcaaaattggtgttggcatgtgacctctgtctccctgatcatgagtcttgggagggggcgtgacttgtgtccccttgggacataaaagctctaaggacagaggaacaagtctttgattctccttattgacttagctttctccagccagttctagcccaaggtggacagagtcagcagcttagtcagccaactgaagacaagccatggatataggtggacactgggcataggaaggcacatgacactggggaccagggactgtgtattgaacccctctatctgagctgctcccttcctaaatgctgcgactctttaatacatttcctcatgtagcggtgatcccaaccatacaatttattttcattgctacagttactttgtaactgtaattttgctactgttatgaactgtgatgcaaatatctgtgttttccagtagtcttaggtgactccgggaaagggccatggaaccctccaagggagtcacaacccacaggttggggactgctgttctggatgaagggatgacagtgtctgtgtgtgtaaataggaaggggacacaccttcttggctctggtgcataccttactagggaggagtggactgattagccatagatgcttgttcttgtgaccatggtggggaaggccaccccagggctgagagggctgggcattccctgccccagcagaaagaatgaaagccaggttttttgacgctagaaaataccagatatttttcttacccgaaatgttgtcttcaatgtgtgtgcatttggtgatcacgagtatcaaattcaaattcaaaccaggtctcagctcatcaagaaaagatgtcaagaacggtgcagggggctgggggagggggggggcatggtgacacacttcttcttcattcacatattaatggagagataatgcttcgagaatattgaagtaaatttcagagcgtcgctgacatttccagaataaacattaaacactttaggcatgagcgtcggaattatttcatgggtgtaaattaaaaggcagccctatgatgctgattctgtttgctctccctaagtttctattgtggaaagtatcagagtacagtgggaaaatacgaagggacctttctccgcatgcagatgtcaacagcccgggcttttatcttccggtaggatgcttttccaaccagatcaatcgcttactcttaatggcgatattaaattcacattttattaggtaatgagctagaattctgtgtggcccacccagggagatagcagcagaggtccaaacatcttcacttgaacccagaccggcgcagtcaattcttaattattccctggtctgctttctccggctcttgtcctgaaagcgagttttcacaattatctttttaaattacaaagaggaatgtatgagcaggcctggcagcactggcccaaacatcctggggactcaggagggtcacaagttcaagcctgggcagcctggtcaaaccaggcttaagaataaaaagtaaaaagaggggagctggaaagggggcctgggggtaagggcctttgccactctaccaaggacccaagtttgtttcctggcactgagggttggtggctcacagctgcttgaagacccagctccagggaattaattgtacagcctctctctttggccctcacttctgtgtgtgggtacattcacacacacacacacacacacacacacacacacacacatacatgtcacccatacacacagacacacacgcacacagacacacacaccacacactcatacaccacacacaccacacatacacaccacatacacatactacacatatacttcacatatacaccacacactcatacaccacacatacactatatacataccacaaacacacatactacacatacacataccacacacacacacagtctctcacacacacactcacacaccacacacatactctctcacatacacactcatactcacactcacatacacactctctttctcacacacacactcacacacatactctttctcacacacacactgtctttcttgtacacactcacacacactctttctcaaatattcacacacacacactcacacacagagtctctctctctcacacacacacatacacacacacccagagtctctctacacacacacacacacacacacacacacacacaccctaccctttctaggaaacacagtatcacagtagatttctgtgtcttcttagtcatacaccattctgacaatgggttctctgtcccatcttccctaacgatttctaaactttccctatacatttagattgctttgattgaggtgaaaagcccttcctgagtctgggtgacctcatgctttgggctgggttcccaaatgaatacaaaggaggccgtgagctgagcaccagcgtccatctctctctgcttcctgactgtggatgcctccgtgacccgccccctcccgatcctgtcataaccatgccttccccattgtgatgaaccctagacaaacccttcccctcttagctttgctaggtgttttatcatggcaccaagtcaagtggatgtgctaccaaccaggtttccactgccatggaaaccatggacctgcctcaaggtcttgtggataaagactgcccttaacatacaatggtttgacttgaggttcttgcttcaggatgctgcacggaatgacaatgtattcccagactagtgagtgaggtgtgttgcgatgctctattgacaggttggccagcagcagcgagctggagctctcggggaattacaatcacacaggttaataaccagtgctctatggtagctgtgtgcaggagggccaagtgtcatacatgcattcttggctcaagactggcttatcaggacagaaccccattgtaagctatggagcctctagatgtttgagcatgacaccagttgtcccattttgggttagaagacagctggagacagggattaggtgctagtttaagagggcagttcccaggacagtgagggagagagacaaagcaagggaaggcagtgtgtctccaactctgcccttcctgcatcattgtgagccacacggacacaacggattcaattgcttagccacatgggatttgttaggacaggcagccatgcctcagaaatggtacattgaagaagggaggagagagaatctgtcccgctctttctcacttcctgatttccagaggtcaagttcatcacagcaggagtgttacttggtagttgcatcatctagctcattggacaactgcttatagagaccagatccggagccccacagctgagggtttctcttaagtccagtgtgcagtgtcccagagactctgatcggcctctgctgtcagagccctgtggaccaggtggagtcgtgcagtaggtgggagacagtgtgctgcggctggtacagcgattgtcagagagaccagaggccagtgagtgatatctgaggacctgcgcctctaaaagatgcattcctaggtgctgcctggggtctaggggtgtgtacacacataaggtcagtaggttccagcaagtgctttccaggaatgttattgtgatctggggccccaggtgcagatcctggcatcacatctgcaccttcaccaactaagtacccacaatcctgcctgagctttgccagcccagtgggtcaaacttctttgccctaagctgctatagtgttttagtgagggaacacacagtaacccatgggtgccgctgctgttatttttgctgtgagttgcctatttacacctacctctaagagttggctacagtttctgctccgtagtaagcctccagcttgctctctcatgctgttcagagtatttaagcatcatcctgaaaaaaacaaaaacaaaaacaaaaacaaaaacaaaaaaaacatatgctgaaaagatgcagttccttccacacccaaacttctatgtgcgtgtgtgtgtttgtgtttcaatagactttctttttttattttattttattttattttattttattttattttattttattttattttatgtgagtacactgtacctctcttcagacacaccagaagagggcattggatcccattacaggtggttgtgagccaccatgtggttgctgggaattgaactcatgacctttggaagagcagtcagtgctcctaactgctgagccatctctccagccctcaacagcctctcttaattgaaatatatatgtatgaagaaggagagactgaatatgacgtgctgtgtgtttgtgtatgtgtgtgtgtggggggggtcccctctccccaatgcaatcatttgtaagggctgggtggtgtctcatcaaaacgcatcccgtgtgtgagtcacccatgtccccgttgtatgctgttctggctgctttcttaattcagggggcattctaactggttctgtgactgtgcgagctataagcacagctcccaggctccatgagcatctgtggctgttcccttaggtggcactttttggaagaatcatttctgtgtcacggagtgtgactattcagaaggggatcgaattatttccccaaattatgctgtggaaataggactgatttattctccctggaagctaaaagtcttcctgcccaggaggctgagtaatgtcgtagcaagaacacaggagagaaaataaagcctaagccaactatggaaagagttatctagccaccaggacccagcgtgagggatctgggcaattcatgtcccctagagccttggatttcccatttgcacaaaagacattatcagattagcacagaatttggcaagctctgtccataacaggctatataaaaaatattttggggttttgtttcatccataatgggctacataacaaatatttttgggttttgtgggcctaggagcagtagtttccaaccaggaacagctttctgctcccaggagctaggagcatttgaggttgccactgttcagggtggagccctgtggccagagcctgggctgatgttcagcatcctccaacgaagagcatagtctctgccacacagatgtctccagccccgagcatcagctgtggttcagtggagaagcctttgtggtccatctcagccacattgcctctgtgcatgcctgtaatcccggcactcaggatacagagacaggaggattgctagctcagagtcaagcttggctatagagttctttgttagttagcctgggctatgtgacacgttgttcccttactaaaacaaacccacaagagaatcgattgcagtttgccgcactacacaaaggtacctccattaatacagaagagagttgaagcagcaaggtgccaggaagatcctgatttggaggctgggaggcagctgttggtggcagggggactgcaccagagtcctagtctagcatacacaaagccttgagtttgatccccagtaccacaccaacaggatatggacatgcatacctgtagtccccaacagttaggtggcagaaacaggagggtcatgaattcaaggtcatcctcagctacctggagactttgaagctagcctgggctacttggtgattttgaggccagcctgggctacttgcgaccctgtctctacagcagcagaacaaacaattgaaacaacaatgacttgatttgtggacctggaaacgtgaatgtcatgtagttttcatgctgcaaacatagttttcttctctgatggttcatcctgatcattcgcttttacttctgcaaccccaggtagcagctagtagtcttagctccattgtacagatccacaaactgaggccctgaaaggcaaaacaccttataagccagagagtagaggtgagcccaagacattcaccctttgctaccccaacagtctgcaccgatcatctgccggcatggttcccgtgcacgcttgagctgaccccacaggagatcagttcctgtgggccaagctgctgagctgaggactggcaggtggctgaacaccgaggagaagctgtcactaatatgtcagtggccatggggacggccttgctggctgtgcgtctggccgtgccctcctctctcagaagggcaccggcagcatcagaaggcccattgcctcctgtcatatctgtctgtcaggctgggagccacagaaaccctgatctaacctcttgtcaacaaaacggctgtggggtcacccactgcccatcaatcacttctccctgctcagtctcctcctctctggacacctctggtccagacagtacccagcttggctggagtctctctttggagggtctcccattgaggagaaagccaaggctctggatcccagcctggggtcaggagggagtgctggcccataggatcaaggatggccatacctcactctgcaggcccctcatctgcaggctcctcacctgctcacccgttgttctgactgggttctcagcaaaccgcaggcatcttcctttgtctgcctctctggtactgggtttacagttatgcgccacagtgcctggttaaggtgggtactggggatttgaactgaggctgtcatgcttgcatggctagcacttcatcgactgggccatctccccaggtctgatatatcttatgttgcatgcaaaatatatgcatttgcagagagaatgtttaattctccttcatctgcatctctacaaaagtcaggaaaaccagatagatnnnnnnnnnnnnnnnnnnnncaaaagtcaggaaaaccagatagatcagaaccccccccccccccgtttccctcctctccctgtctactttgttcctcttaagtatgagcatcgggacttcacatttcctgtctaggtcagggtttagcagtctatccctgccactcagatcctgcccagggaaatgcagtttggctgtgactcccaagcacagaattagtgtatactcctgggtgtgtgcacccaagacctttgaagcaggtcttcaagcacatgaaaatcttcagcagcgaaggcaggaatgacctatttagatcagtagatgaaaggatcaatggtgtctgtgtgtctgtacggtgtccacacatgcaatgggatattattcagcaacaaaaaagagcaatgtacttaaatgtgttgcaacatggatgaatctccaaagcatggtgttaagtgcctggagcgatggctcagtgcataagagtaccagttgctcttgcagagaactaggctttgggttttagcacccgagcgccagctcacaagcatctgtaactccatcctgttcttgggatctgactccaacttctggcttctacaggcactgagcaagtaaaggggtgtactgaggtctacagggcaaaacatttatacacattttttaaaaacccaaaactttgctaactgaaagaagctagacacaagtgtccacatatgtgtgagcccattggaaggggagtatcaggcagaatcaaccctgagtgcagacagcgaataggacacttccaagagacagttgagaggatggggagaatgacgaatgggaacccgtctctatgagggcaatgtcagtgcagaactgggcagatgctgagtcttcctggaggctcaggggcaggctttggcctcacctctgggtgctgtgggggccgcagcaaccctggactatctgcttttgccggaagctgcttgttcccacccctccctcctgagccctcacatatgctccccactgctcctgccttgtgtattggtcttttgtgttcccgaggccattgatttaaggctacacactgaccttgttgtaaagaccctgtttaaaaatatggttacagccaggcatggtggcacatgcctttaatcccagcactcaggaggggcagaggcaggtgcatttctgagttcaaggccagcctggtctacagagtgagtttcagaacagccagaactactgcacagagaaaccctgtctcgaaaaaccaaaaaaaaaaaagtcacatttggaggttctaagcatggatttttttgggggggcggggttcactattcatcccagtatatttggctccagggtggaattttgattctagagaagggagcatgggaagggtatagtggtaatatgccctcaattccagttactcgggaagccaagttcaaagctatcctgggctatggagtgagttggaggctatcctaggctacaagtgtgaggtcagcctgggtaacttagcaagattatctcaaactacttaagaaggaggaggaggaagaagaggaggaggaggaagaagaggaggaggaggaggagaaacagcagcagcagaggagagctaaatgttagagaacctttctagtatttttagagcctttgggttcaatctttagtaacacacacagatataaattaatgtatcaattggttagataagggcagatgtgcaaactgtccattccttatctagttcatttacaggttgattagacagccacagaaaggtctggatttgggggctgctatatggcgcagtgggtcaaagtgcttgttgccaagcctgaggacctgagtttgatccccaagacccacatggtggaaggagaaactgagtcctgaaagttgacctctggcctacacacacacacacacacacacacacacacacacacacacacacgaaacaaacatacaaatgtaataaaaaatttaaaaaacattatgaagcacctactgggtgtctgctactataataagcacacagttgttccagtgaggaaacaggacttcagggaaggccacggagcttaagcaagaacttgcccaaagtttagaaagaaagctccaagttacagaaccaagtgcccgaccccagagtctttctttgtctgacctgagggctttctgttaaaatccttatacagcagataagtaagtcagcagtcttagaggtgggaagaggtctgtctgccagtcatctggctccctgcaaacacaggcatccccacccctgaacaattttcttcataggaaagttgtgagggaagtcacaggtgcagacaccgccccgggggggagggggggctcagagttgttccttcattcagtcaccaattcagtcttccagaatcaaggccctattgacagagagctaagccaccggggcgctgccttcaaggtaagaggcatagatcagtctcctgaatgtagagggatgaattccctccttcacataagtgaaagcgatcatagggaacggaggcatcattagggcgccctccttctgacagggatgcagacaggcaggtgagggtggaggggtgtggcccagggcacattcagagccaaactctgttgagaacaaggcaggtgtttctgaaaacctctctgattgcacccgtaccctcccatcaggcccgaatcgcacacctctctgcctctcctcagacgccggcccacgtggcttttgaaaacctggggagattataccttccagcttgctttgctgagtctgaggaacctggctgccttttctcttctgttaactgcaatcaaactggttttgagcaccagccccaagatgtctttgccagtccacatccatcttccatgatgagctaaggttccctatttgtacccttactttctgggctgagtcatgacatctgggaatggtgctttctctgagaacttgcggcggcggcggggggggggggnnnnnnnnnnnnnnnnnnnnaatgagctatgtggttggtcaagatactgaagaggcttgaccacactgggaggttcctgtgaatagagtgtcttctactcacaggacttggcattatggtcctcagggttgctccaggcaggaatgcatacaggtgggcttcttgtgatatgtccttagcctccacaaccttccagctgtctcccttcattgaacccactcttgctaagcctcaggtaccagacttacaggtccgacattagaggaggtctgtgccatgttttctactcttccccgtgcaatggtcctcaggtagggcagcctgctgtggtcttcggagatttttttttttgcctgttgtagggtaaggctgctactgggagaccatggttagacaagtcagctgctccatgttctacagtacacgggatggccgagtggcaccgccgccaatgtcactagtcctcaagcagaggtactgctgtggaacagtggatctccatgactggtcccaaggagagctaactgcacggaagccctgcagtacttgttggatgattctcaccacagcccacccaagaggccactctggggagggggatccagcagggggtggcgtgtggcaggtgaggctggatgcagggtgggtgtgtatggtgcacatggagaagtcaggagatgatgaccttaggtgctgctcctcgggtgcctcccaccttctgtttgagacagggtctcgaattagcctggcacttcatcaacttggccaggataagtggccagtgggttccagaggtctatggtgtctctttgtccatattcttgggcagcttctggggatacccagctcgggtccttaatgcttacaaagcttctgagctgcagttgatgttctaaggaacccggtggtgactcagacaaacgacatataagaatcattaacccgagctaagagtgtgtaacatgacctcagggtgcaggcttatctacccagccctttaggaggctgaggcagggggaaatcacaagtttaaggcaagcttgggctacagagtgcattcaggtctggcctgggcaatttagagagacacttttagctagactttgaagactgatgggtaaactggaccatcttcttgtcagggatcggtgggttttgtacaaagttctcagtgggtggttttctggtggaagtgaaataggcagaaggagggggttatgggaaaggtttgaaggcagggatagcctgcactaactggctgttgagagtttggccttgggcaaatttccaggtctgggtcctgactttagtacatgtgagcttcctgatttagagctctgtctctgtgacctgccctctgactctgactctgggatgacagtaaagatgagaggcagccataggaccactgtggaaatgaaatgatagggctgtaagatccaccagcacctgagttttggttcttctagagattagaggtggggggtggggagtcattttattatgtagcccaggatacccttgaatgtgtatcagtcatcttcccgaagcttcctgaggcctggggtttccgttgtgagtcaccacatctggcaaaacaactgctttaatatatgaagtgatgatatgctcttgtctagagcagccaaggggctctgatgatgcggctaccccgggcttctatgcttccccagtgtgatggtttcctcctgtgcctggcaaatctttcctgtggctactcaagtatgctatggctgctgatctactggaaggggaagatggaaagggaaagaaaaagggggaggaaaggaagagagtggtaacaaaggtcccagggcttttcctgaactctgattggccaccttgagttgcatgcttctgtctgagccaagcacagtagtttagaagtgtaaatactgtgccatttacttgatactctaccccaggactgataggggctcagtctgcatcagcttcagtcggtcggcttcccagtggggaatcaggctgtactttctaggaaaggtctgggaatacaagccatatccaaatccaaagatctctgtgccctggagggacacccctggaaagatctggttgtgtttctttgcatggttgactgagccccctttaggtctgtgtattagttacttttatgattgctatgaccaaactaccttgcagaagcaacttaagggaagaggggcttcctggggctcatggattcaaatagctcaacctttggtcctttagcctcatggtcttgggcagagcatcatggtggcggcagtgtggcggcgagctagccagagaatgacaggaagtcctgtaggtccaacctgctaaggtttccatagccttccaaagtagtgccactaactaggaaccaataattcaagctgtgagcctgtggggggacacttcctgtccaacccacccccaatctgtccatgtgttgaattgactgtactgagttctaaagatgagggtttccttccagatgtttgggtagagatttctaaacatccattctggccatgtggggctggacaactcttgtcggcgggggtggggtggggtggggtctgttcatttataaaatgttggtcagtgtcccctggtctctacctaccaccacccttccctttggagttgtgacaagcccaaaatgtctctgtatattggtggctgtctctgaggatcacagccaatagcgaggaaagtcatagataaggtttctatgccctctgccctgttactcttagtgagtttagtctttcggggccagctcccttttttatctctgggttcttggcgggggtggggctctacctccggtgctgttgatgtttttgtgatgttgaacacaccctgtcgaagcagatctccagccccagtgacctcacttgctggggcttgtcagagccccatcaccagcagacattccagccacctcttagtgatacctaagaaagacacactttggaatatgaaccccctgccttgaccttggaatgtgatctgtcactaagctgtctctaccgagtccacaaaatatagatggcatgacaccttttttggacagtggctctgagtctcagaccaagggagacaatcatttgtccgaagctcagagctcatggtgcctggctggggggtcggaggggtctctggtagccgggctcatcttctctgtccccctagtgcccactaaggcagtaaattccatggaatgagcctgtgtggggaacgtctcagccacccttttgtcccatggacgattaacttcctccaaacgctaagtagaaggtggctgcataatttaaaacgtcacatttccactggggagaattttcagctcagacaactccaaatgggtctgatttaagttccataaactcagttcaaggcaataaatgtgtgagtaattgatgaagtatcttgcgggggactcaggcctcatccatcactctaggcgagccagggctgtggacacgctccgaggacaggctgataggagggggataaatggttggagactcagacagctctgtcctctccataactcatagatgcaaactccccactccccgagtcatggcctccctccccaagagcctcttccatgtcttatcacctccagccaggaagaggggctgctcggggaaagctggccataggtacctcggttgcagctgttcttttattgtacacctactctgtgccagtcacctcacttcatagtccagtatccagcccatggggacactgtgagatagagtctttccccatgttatatagagaaagaggtccaaaatgggacagacctcagatgacaaggtcagacagcatggagccagtctggatggcctgctccatgcttcaaaccgacccagctctgcctccaaggacaaagaggcagggctcttggaggtggagggactttggatcaaacaccccatctgacttgcacatcctgcctgggactctgagtctccttctccctgccacactctaactggtcacgtttgttaccactctagctacaactggttacaattgaaactgatggggacccaaggctggctgcttttatcccttcttaggtccatctgcggtgatggccgtttggacctcttgtctgtcaactcctgttctgtcctcatttaagcctgtgccaggcagagcaagccagctgatttccatttatcactgacactgtccaggttagggacatgctccgaggaggtggctttgtgccatccacctgcccagtgtctctcttgagtcttcaggatacttcctcactcctgcttctctctgaggcgaatgcacaagcaggtacccccgagtgttcagctgtgaagttgtgccatcggggagattcgaattcccatcagtgtcaaaatgtcattgcccttaagtggttccccaaatgtcagttttcctatttgtaaaatgaaatcatcaggagggggattattcattcattcattcattcattcgttcgttcattgattatcccatgagtacttgtaaggaccctgggcctgccatggccatacttgtttctgaaggatatggggcaggggccagtgacacagacttgactattggaagccttcactaggctaacgaaaatagaacactcaggccagcagtccacaaactggtcagcactttagaattgctggtattaagctttgaacctgggatatccaccacatgatgacacagtatagggatactgtggaaccatgaggaattgggggaataggtccctaggggtgggcctttgaaggttatagtcccatccctggttccggtcacatactctaagcagtcctgctttatcaacatgaatcagcctctaccacatttccccaccaccacagatgaagcttgtatcagtcagggtttctgtaccagtgtcaaaggcagcttgggaggaaagggttaattcggcttacactttcacatccctgttcatcactgaaggaagtcagagcaggaactcaagcagggcaggaatctgggggcagaagctgatgcaggggccacaaagggtgctgcttactggcttgctcctcatggcttgctcagcctgctttcttatagaatccaggagcaccagcccaagaatggccccgcctacaatgagcagggccctcccccatcaatcagcaattaagaaaatgccctataggcttgcctacagcccaaccttatggtgacatcttctcaattgaggcttccctccttttagacgactgtatcctttgtcaaactgacacaaaactaaccagtgcaagtgtccctctgtcctgccttcccaaacttctgaatccacaagccaaaataaacctttcagttcttttactttttttccctttcagttatgtgttctcagagacagaaaggtaaccaaggtacatgtagacttgtaccattcaattagagccaggcggggtttgtcaaagggtcagacaatgattatcccaggcctaagtgctacacagcctgccttatgaccagtcagttcagtaggcctgggtgaatggttcaactttatttataaaaacgtgccatgggctggattggatcaagaattgctgatctctaaatgaagttagcctggattatcattgggtggttccagtagctagcaatctggggaagcccagatactagcccacctggcctgtgttggggactgtcactggactgagctcagttcagagagcctgggtagctttaccagactgtgggtgcagaagcaagacaatggccctggttgcattaagttatgctctgttcctctgtttagcttaggggccttcgtctatacaaccaaatccacacagcctgcccggtggggtcatgggaatggatgtagatatgaaggtgattccatctatggtggccctcacaggggacagttgtgagagactgagatgtgtcgagttcctaacctactgttaggtagaccgggaagcacagacagaggtgttgggggcaggagcagtggtctacattttgcagctggtgaggggtgggcgctccatgcccagccattctagcggagtccccagtatagggtaggtctggggaaatgggtctggagatatgtatggcatttgggggtgatcagtggaggataggactcctgatgaaccctggttcttcagcaaatggaggagacaaagatgccatttggagacccgggttacactctatggttggtggttcatctcagcacagagctaaatgctgcccagaaacattgaagatccctgactggtactttgtctcttcaggagttcatggtcaagggtagaggggggaaatgggtgtatgccctgggctctctatgcataagacaagccaagaaccccaaagggatgctgtgtactaaataccacagaggggtggtggctccctgtatgttcatgcaggcttcatggaaaagctatgtgtaagactacaccttggagcaagcgttggtaagaagggaggagaaggctctagtccaggagaatagaatctttaaaggtaggcactgcattaggggttggggaggtagctctggtggtaaaatgttgagcatacaagcaggaggtcctgagcgtggtcctcaggactcacatttttagaaaagctgggtggctaagtagataaagatgcttacatcaaccaacatcaatagcctgaatcccatatacagacctcacgtgacaaggatggaaccggcttctgtaagttatcctctgatttccatacatgtgcctggcacctgcctcccctcccttacaccaacaaatacatagataaatatgtgggatagcttgaatgtgaatgattatgtaggctcatctatgtaggttagcccccagctggtaaactgtttggaaggattagaaggattagaaggggtggccttagaagctcactgtggagggtgtgtgtatgtgtgtagtgggttgacctaatgctgcttgtattctaatgctaatttggggatacaagacttgttaccctaaagagagtctgcacataagacaatgagtggccctgcccctgttaattgcgattggtaaataaagatgccaacagccaatagctgggcagaagagacataggtggagttgagtttttgagggcttgggtcagagaggactatgcaggagggaggagagccaccatgggctaagggccaaaagaacgtggcccaaagggctgcccaattggaggtaagagcagcccagatggaatatagtaattagtaagtaataattcagggttatcaataggggaatagattctgtcagcatggagggtaggcagctgcccagctattgtgctgcctaaagcttattgtaaatataaaggctgtgagtgtatctttcttctcagaacttaataaccaaaaggtggggtagaaaccccaggctgagactataattattttctactatagggatgggctttgaggtttcacaaatccataccaggtccagtggccctctgccttctccttttgatcagcatacaaagctctcaggtattgctcaagcgccacatctgcctgcttgctgccttgctctctgacataataatagaatgaatttaaactgtaagcaagcccccaattggatgcactccattttaagagtttctgtggccatggtgtctcttcatagcaatagagatcctaagagagacaatcagtaaatggatgtgatttttttttaaagttttaaagccagatgtggtggtgctatacatttgtaatcccagcattggcaaggcagggaaaggcggatctcaggggcttgccggatagccagtctggcctaccggatgaattacaaggcaatgacagttcctgtctcaaattaaaaaaaaaaaagttggatgtcgtctgaggaacgacagctaaggttgtcctcaggcctctatgtgcatgtgtgtatgctcacttcacatacctgtacacacccctgtgccccacaaacacacacacactgcgacttcatgctatgatgagaatatactctggggaaatgccagcaaaggctaggatggaaataagtgaccctcatttagttagctctgtcacctggctggggaagggctgcctatttcatgtggccacagtgggtcactatagtacctacccacagtgatgcctgtctttgggacagtgacctcggactgtcccaaattctaaggttacacaaacagaaaaaggccatctgccaccagctccttgctaggtaagcaaagccctggcccctgggccccaggtgagcaatccatccgcagcccatgaattcctgtggacacaagcgctcccccccccccccgacccccaacagagagagacagggcagttactgtcaggattattctagatatctcgatgttaatattttgagttctgtttctgttgtaactgtgtcatctcattatgctgaaggagtctgacatcttggcgtgcccccttcctttcaaatcatagtagtaaaaacttgagagaaagagagcagatgaaatgtgcctgtcttcagatcctggggaagacagtgctccctccattccctccaatccttggagcagccccccatggcttcagcctgccatggcctcagccccccatgacctcaacccccatgagcttagccccccccatgacctcagccccccttggcctcaggccccaccccatgatttcactttcctttttgctcctgagagctgctggccaccctccctacccacagtctccatcacctctggccacttccccatccagttgtttacatcttaaattcacccatccatcatttccacaatggagcaatgacaactgctctggttacaagtctgatttacagtgaattatgggggaaattacctgtcgggattcagagaccagttgcaacattttttggtattggttttggtttgacctttctgagacagggtttctttgtgtagccctagctgtcctggaactcgctctgtagaccaagctggcctcgaactcacagatatctctcccccccccttctgcctctgcttcctgagtgcttggactaaaggcatgcctggctggcaacagtcatttttaaaggagaagaattaatatagtaagaccttcctactagattccaaagatgtctctttgttgcttcacttatcttatttttaaattaaacttttaaatgttgttgaaaatttaaaacacagtacttttttaatagtatgtttttaaacagccccctactctgtccaagttttcatgtgttcccccaaattcatgaccttttttcttctttagttacttgtgatgtgtgtgtgtgtgtgtgtgtgtgtgtgtgtgtgtgtgtatgtgtggtgtatagtgtatatatatacatatgagtgtgtgtatatgtgcattcatgtgtgtatgtggcacatgtatatgcatgtgctcatgtatgtgtgtgtgatgtatgtatggtgtgtgtatgtatgtgtgtgtgtgaatgtgcaagtcgagtctgtgtgtatgtgtgtgcatgtatacaacctaatgagttcatttagtgttgcttatatgcagacatgtttagggctaaccacccaggaatggataatctgtcaggtgggcacatgcctggggagaaaataattttctctctctctctctctgcagccattgattttctgcagctcttcaactggggggaggcttagaagatttccctcatccacactggcacatcacctggcattgtcactgtgtagatcttgcttgggtgaccattattgttaggattatatgggcacagctcctctgtcatacctagaagacaccatctcccagcagtgtcctgtcttcaggctcacactgtctttccgtcccctcttccttgatgtcccctgagctttaagtgcaggagttgtgtggtagatgttatagctgggggcttagacacctcgtggtaaattgtctctgcattttgaccaattgtgggatttctgtcatcggctctctctgctggtataggaagtttctcttaggtgtgggtgagagctgtaagcagccgtgggtgtagggaaaagtgtatagatgtccattggcaattattttggcttgggaaggtagcattgctaggttgtcctctagagtctaagactgtagccaacacctggatagaggggacaggtgacacagatcttggatagggacccttgtgtgatgtcttctgggcacaccctcttcactttcccgattccccctcccacacactgcccctcccattttttaccaaccgtttgctagtgccgccccctcccccaccccacccccacccccacgctcacctgttttcccagggtacttttccacctggatacactccccagaggcatctccttcatctgctctccccggtaaccaccacccgcctctgattctggctcacatatcctcaaggtcttttctctgctttgataaagtaacaactagaaaaatctcattaatgaagccagacagctgcagtgggagttaattttcttgttcctctgctcagcaagctgactcgatttcagcagtgacctgccatcagagacgtcattgtctcaaaggaatattctcccagcggactgcagggggcaggaagaacacaagctgagtggggcttggtggtacaagcccttaatcccagcactctcagcaggtggaagctgagggtcaggagttcaagtccatcttgagctgcatgaggctctctctttcttggaaaatgaaggaaaagaaggaaagaagtcgagaagagagaaaagaaatggagggacacaggctagaattagcatctgtgtatcagtggcatgtgtgtgtacatacatgttcatgtatgtgcaagcacaggcatgttcatgtggaggccagaggttagtatcgtcttcctcagtcatgccccatcttattttttgagacagggtctttctctaagtttggatcttgcccattcagctaggcaggctggtcggtaaaccttgggggtctctctgtctctacctcccatccccagcactgcacatacagatacacacttttttacgtgggtgctggggactcgaactcaggtcctcatgtttgtgctgcaagcactttactgactgaaccctcgctcaatcccagtgggttagcattttggctaagagtgttgtgactctccctgtgtccagcagctgctaggttaagtgactaaaagagagacactaaggacttctagatattttgatttgatcatttgtcaaaaggttctcaccagcaagtaccagaagtgagtcttgaacccagacctagtgactctgaggtgaggtagggtaggaagaaatctagtggactaaggaaatgaatctcttagtcatccctgaacattttctgtaagagtccagttgatcactatttttggctctgtgagttacattgtctccgtcaccgcctctcaattttgtggcaaggcagccgcagataacacgtcagtgtttgagggtggctgggtgccaatcaaagcgtatttaccaaaacggacaacaggcctcattagactcaagggtcgaatgtacggacctctgccctaaatcacagacagcagagagcttgcggtgttctaactggcctcagggttctggaatgatgaataggatgttgccgaccaacagcaacaatgtatcaggcgctttgccgagtgagttctctaatcgtgactcccaccatccctctaacagccccattaggataatctatgattccctcccccccttttttttgtaagagaccaaacagagagtcagggaggtaaatgggtctgaggtccctcagcttgtatatgacatagctggtgttggtcacacatctgcctactggaaaattccacattcttcctcctacgttgcactgggtgactaaccccttgttagggctcctcattctggaaggttttctatctcctcaggaaccttgtattctaggtcaaatctccaccctgacccccacagtatggtcaccggcttgacctctccacctccattcatgtaatgttgggggttggatatcccctcctcagctggtggcgctgttttggaaagttgtacaatcttttggggggggggtggtctggctggaggaagtgggtctcgggaggtaggagttgaccgttgatagctcaggtctattttatgtcccaactctcttggtgatgtgagcaagccacctcactggctgactgacatgatggaaaccagagtcaagttggtttttttgtcagaatccccccagccctagacaggtaaattcactattgtctcttacttggcctcaatgccatagggagtcctcaggaatctccctcaaatccttgtaagtagccccacactgtgtgttagggtgccctgaatctcatctgagcaccaccatcagccctttctcccagtgcttattccttagtgggggaccaaagtccaccataccagggactcgtagctgggactaaacgcctgatgcaagcagcttcaggaaggaaaggtttactgtggctgatgattgagggaggctacagcccatcgaggtggggaagacatgggggcaagagcgtgagacagctggtcacatgacatccacaatcaggaaggagagagagagagagagagagagagagagtgagagagagagagagagagagagagagagagagagagagagagatgggttctagggctcagctcgctctctcctttgtcccttttattcaatctggaatcagatccctaggtatggtgtgaccacattcagggtaggtcttccttccttagttaaacctcgctggaagcacctgcaagggcatgcccacaagggagcttcctacatgattccaaattcagtcaagctgacagtgaatcttttaaaaaattatggtatttgttgcatgtgtgtgtgagcgcatgtatttctctcctaccttgtaggaattaaactcaggttatcaagcttggtggcaagcacctttactgctgagttggctcccagttttctttgattgactacgattcattttgagtactggggcttggtgtagcagctggaggggaccttgtgggagtctgttttctccttccattgtgtgggtcccaggggtcgagttcaaatggtcaggcttgaggtaacaaaggccttcacccaccaagctaagtcatcagcctgccatcagtgaagtgtggttatcatgcccactttcatcaacgcactggctggtaccacgtggtcccctatgaagtcgttaagagatttcatgatgatgtttgaagcttacaaagtggactatatttgtctctggagaaagttaggtctaagcccgtgaataaaccccactcggccggccccaaagcttcatggagctgtaacctttggagacggcacataattaaaatgcttttagatctgatatatattatatttgaattggatattaaagctaatagagttctcacccactgtgtgaatggtatgggcagctttagtcaaagcttgctggctggacacccaggataaattagtgggacttgggctggtgcctagcccgtggcctcaaatcgaaagtttaatggattatgtcttattaggtgcagatctctttgggctcagagaattttctagtcaacgtgaatgaggctaagttgtccctcgcccccgaaaggaaagcttaaagacagtttggagctcctgtgtcatttctgagtttttccataccggctctccatctcctgactgtcctagctcagaccccaccatccccacctacaatgcaaccatgggattaaatggaatcccgaatctaaatcacgcaacctaggtcctccatgcagtaggtgctcaatgcatgctggctgtttgcattaaagctcaggtctttatctccatggaaatggtgacggattaggcatgcctcctcatctctgggggggggggtttagaggcctccacactctgcttcctgtccatgtcgactctaggaagatgactgtcacatctgcctcagaagggggacaccatgatctacagggagcgcggcttaagatttataggaaccggcttcagaactccgctcagcactagctgcgcgactgagcgactctgagcaagttggctgtgctttgtaagctgtggacagtttcccaggggtgcgcttatcccagggtggggttgctatttaaagagaccttgagttaataggagcagcactgaaggtcacggtgtggcctgtttctttctgctgactaagaacccggaaaccgggaggtggaataaaatgtaacctgtcgggtactctgccacagcactgtagaaggaaggagcagagacaggctgagggaggcccgtcattctctgggacatgcgcagtgattaaggctctgtgtcagctccaaatccagcactcggagctttgcacgtagatctcctgtggagcagctatgatggtcctcgggaaccatttctggcccacatcttaggtctgcctcagatttgccatctgtaaaacggacatgccgttagcatcttgccttggtccatttgtgttgaagctgtcgtcgggcaccagcagcgatcacactttggccagagctcaccccggtggctgttctctgggcagctctagagctctcccattctcacccccacgaaggaagctggaattaaaggcagaatctactcaccttggccaccagggagctcgtaaatttcctaaaaacagcccacaactattctagtgctcaagcgcaagttcccattgccttaacccgccccccgcgcccccgccccaagtctggactgttgtgtttccccagaaggctttctcctgtgcagtcatttcctatttcccacaggagactcttacgaggagaaagcttgcctatgctgttcattacatcccagatcctcaaagtcacgtttggcacacaaagtgggttgtgtgggctttgcatcattgctgcaaacagatcaccacaaacccagtagcttaaaaaccacatctgattggttaaccccaatagctcagaaaggtctgaagtctgcaatgagtctcatggggtcaaacctgacccagagggaaggatacatttttctctcccttcccagtttctggagacaggacttaaaatgggttggaattcatggtgtcttctgctcgtcccagatagaggtaggaggccttgacaggtgaagcctcgatgttcccaccagtaaaatgggctgttgtttgttgagctttagctatgtgactcagcttggcctttatctgcccttgggtaaatggggtaatttcttggtatcctgctaatgaaagggaaggtgagactgtgaccgaaaggtcaccaacatctatacccggtcacacgtggctccagtgggatagtgcatatagtgtatggactcgggcaggggaagattacagtggtgcgggacacatagtgactttcaccccgagtatctggttatttccttcccctaaccccttctcccctcccctgctctcctcttactccctctcccttccccttctagtttccttgttactagggaagcccccagggcctcccattcaccaagcaaacccatcactgaatctcattcccagcccccctcttccctttcacttaccaagtcaccaaggctggccttgagctcacaccttagcccaggctggcctcgagctcacaccttagcccaggctggccttgagctcacaccttagtccaggctggcattgaactcactccttagcccaggctgacctcgagctcacaccttggcccaggctggccttgagctcacaccttagtccaggctggcattgaactcactccttagcccaggctggcctcgagctcacaccttagcccaggctggccttgagctcacaccttagtccaggctggcattgaactcactccttagcccaggctggccttgagctctctccttagcccaggctggccttaagcttgtgaacctttgacctcactctccccagtagctaggattacagccccgtgtcaccatgcccaacttactatatttctcttttctaattttcttcttatttctttttccttttcattcttctctccctctgctttctccccttccagttttgtctgatatatctcatacctctcattgttttactcccctcacacctgatttcagactctccagatcagagtttaaagttttgtaacaaatttacatatcatctggaccagacacagcggtacttgcctgtaatccctgcacttcggaggtgtgtggtcccaacccttgggaggtagaagcaggtgtagtatgaattcaaggctagcctcggctacatagcaaggttgaagccagcctgggctacctgagaatgcctcaaaaacttgaccaaaccaaaccaatccaaacccaaaatgcatataatgcatataatgccgacactttattaaggtcagatccttcagtgagatcgtctgtttgattctctgatttccatagtgatctcaaaggccggggactcctgcatggtatcccctgttccgttcagaggtgatgcttaaagagtttccacaccctgacctaggaataaggacagatttcctcccaacttccccttcccatgcactggcgagggaaatatctcaggcgtctattattcttcccttgaggatgaagacagaggtgctgagcaagactctgtcttgttatcagaaaattggggtggaaaagcagcttccaccagttacggagacatcttaatagacgctttggctgttacgaagaagttcctagatccgtttaattgccgtaaatgttatttgcctttcctgttatgataaggcctccgttctcccggaatcattttttttctttcttccctttccccctccagccatttccctttgctctgaggcttgcgctggcaagtttaatgaaacccaaacaaaggaagcaagagcaaggctcttggagttcgagtctcacgcccacagatgaagccaagccccgggagtgacggctccagactaatgaggctttgctggttaatgcagttgacaggatgcacccccccccccaacctccctcctcaccccgcaagcccagcctgcaaagtgaaagccagccccggagcttaattgtgtctgtcctgagcataggggccggatggggactaagtgccacagggagctaatgggagatgctcataccctgagatgactcgtcctgtgcccaactgagctgtgacttgtcatctgagcttgcttcttctattcagggcaggcagtaatagaaacttccaatcaggagtctgaaccttggtgcaaatgattctctgggtactttagttgttgagtgtgtgtggaggtatttctcacctaggtattatgggatgttaaacagcaccccggggtttcatctcactagctaccagtaacaaactcccatgctgtttgacagctccagaatgccgtcagaaatctccagatagccccaagggagaggcagctcctttgttaggacattgaaagtactctcttggggtgtgtgtgtgtgcgtgcgtacatgtgtgagtctgtgcctgtgcctgagtctgtctgtgcatatgtgtgtgtgtgtctctgtgagtgtgtgtctgcatgtctctgtgtgtctgtgtttgtgcctgtgtctgtagacacacacacacgtgtgtgtgtgtatgtgtctgtgtctgtgtctatgtgtacctgtgcctgtgcttgtctgagtgtgtctctgtgtgtatctatgtctgtgtgtatgcctgtgtctgtgtacacatatgtgtgtatgtgtgcttgtgcctgtgtctatgtctgtgtgtgtctgtgcctgtatttgtctgtgtgtgcacatgtgtgtgtctgtctgtgtgtgtgcctgtgtctgtgtctgtgcacacatatgtgtgtatatgtctgcatgtgtgtatgcactgggcttgtgcctccctggtgcagcgatgatagatccgtgtttgttaccattcccagctcctgggtatggttggaggatttgaactcaggtcctcatgcttgcatatcaagccctttacccactgagctatcctcccagtccctttagggaggatttctgaacatttacacttgcttctcctggtacctgctacgtgggtgcgaccttgagcagataggtacacacccttgactcctttgccttcctttgtacaacgggaataaccatggcactgggtgcaaggacacatagcttccggctattaagtatacagaggatttcttggcacatactaagtgttcaataaactctgtttggtacaatactcttgggttcattaaacatgtgttaagaacatactcagtcccaggcactttgctctgaagtgaatgcaaagatgaagatttggtttttgcttttgtagaagaattaaatataatacttgtaggaactacctccttcctcactcagggcagacattaccaattaatctcaagacttgtaaggtctacctccttcctcactcattactaatcaatctcaagacttgtaaggtctacctccttcctcactcattactaatcaatctcaagacttgtaaggtctacctccttcctcacacagggcagacattactaatcaatctcactgctcttcctctcagtctttctcaactcatctctagtcaagcactactaatggcctgtgagtagactctcattcagtacttcccattgtataagtgactcagaggaggctaaactttccctgcccagcctttcagcattaatgggtagcatctttcttcccatgtctgatgtcattctgaaagaggggttgccattgagaaatatttttagagaacattgtttttcttttttatctcccctagaaacagaactgagtagtaaagtgggtgttgccctttagttagacgttgtgcaggctgtgggtcttgtaaatcgatcaagctacttctttcttcagttccctttagcatttggggcttgggaaaacatcagctattgctcaaatgggtcccagcttttcaagggcagcatagaggtctctggaaacagctttcagatggctgggaccatcactagatagaatagagagtaggctggggttaaatgctccgccgcagtgtgttctgagagcaacactccgtaacaatggctgtgagaaatgaggactgcatctgcagccctgaggcccccagaaggctccatccatctggctgagaagtgggtgctggcgtggggttggccacttgcctctctccctgtctgtctagggctgttttatgtgtgctgcctgccaaggacttccaggaggctgggagcgnnnnnnnnnnnnnnnnnnnnnnnnnnnnnnnnnnnnnnnnnnnnnnnnnnnnnnnnnnnnnnnnnnnnnnnnnnnnnnnnnnnnnnnnnnnnnnnnnnnnnnnnnnnnnnnnnnnnnnnnnnnnnnnnnnnnnnnnnnnnnnnnnnnnnnnnnnnnnnnnnnnnnnnnnnacctagaacttgtccattatattataatcaagacccttaaaggaataacatttaattaatgattaattacaaattaatcattaattaataacatttaattaattaatcaatcagtgtgtgtgtgtatgtgagcacacgtgtggaggccaacttgcaagagtcagttctctccttccaccgggtgggacccggccatcaagctcaggtgttcgggtttgttggcaaagccttcatccatcactgagtcattccagggtctcacacatacagcttccatcttcctttcttctctgcttttattacaatgaagtgcagaatgaccttgaactcaaggtcctcctgcctcagcctgagcgatagactgactggtacgcttctgcatgccctacttctgctggtagacatatttgaaggcatctgctgcctgccctgcctggggagtctcctgggactcaagagcccatgacctaaactgggtacttccatggctcggcaggctgaggcatccggggaacctttctgaggccagtggggctggggttcctttttattcccagggcccaggcagagacggctgagcctttgaccttcctgtctgttcttgtccccacagacacactctctgtacctcgctggtcaccacagatcccacgcagagaccttggcaattccatcaagcacaggtaggtaggaggctgatggtggtgaagggggctgaatcctatggggacctgtaacatgtccatccccagcttccacgctgccatgtcctgtcttttgctggaccgacaaggctgcctgcatcacagccttgccttggtcaaaccgacagcaggcagcagagaggctttatagtcaggctgagctgagttctaatccctcccggtaacactttgtagccttgggagattacttaacctctctgggctccactttttgtccaagtgatgtttttattattaaaagacacataccagacaatgagagaaataaagcaagaccccgggatattacagtcaagatcttcaaagaaataacattaaactataacattaaacaagacaagcaggctacagagagagtgacatcaaaccacagttagagaagaaactttgctttcttgtaagaattaagccaagtcccgtgagttcgtgcatcctgcttatgaataagatgatgatgtgcaccgcgcacacaccttgctgatactaataagtacttcaggctccacagcggagctccctattcaaggaaactcaaggtggccagctaaacgcattgctagaggttagcccaaagcagcaggccaataggcacgtgggaggccttccctcatcccccacagcctagaatttgttttccaacaacttcgtgactctcccagattgagctttctacacattgttccagtctcctcacagactcgggggagaagaggggaagtcaggccgggatggcgggatggcacgatggcggcgaagctcactgctgagaggaaactgaggcctccttggataagggaagggatggaaagctaattaattatgctcagcctatgagatctgagatacctccccaggcagccagctgggctcctgtttgctccttcagggagcctttcttccaacatgcagaaggcttgtgtcattgttgcagcacagagtgttattgtcaacgccatgggacttaggtctgtgcccctggggagctggccagtcagcagagggtctgccaacaagccatgacagtccccagaggtctgtcagaggcctgaggggagaaacaccagatgccaacacagacacacagtctcagcctggggccaggctggacagagcactccgttgcggcgactcatcaacagctcttaaagaaaaatgtcagcactcaaaccaagggagaccttggtgtaggtgtaaccctgagaaatagtgatggacatgtcagtgaccaggtggagcaatggttagggggctgagctgtggaggggagggaaggcaagacaagggccttgtaaaatgttttctggctcagctccaccttgggctggccacgatccctcattccactcactcctgggttgcctacggctgtggttcatttccacctctctgttaaccacatctctggctcagccacccctccagattggttatccttgctgctcagtcacacccctgcctggagatactcttacctcagcctcacctggttggcgcccacccctggactttctcaccattacactggaacctggcactgtccagcttcagaccctggtatataggggaatcaggccccagagatggctccctggtgcagtgagggcctcctgttggccatcagctcttcagcctcaccctgcattcccagcccttggctagatgccaggaaggagagtctccctgcctggtaaagaaatgatgttaacaacccattccctgtgtcgtggggtgtaatggtacacgctagcagtcccggcacacaggagggcgaggctcaaggtcaagcgttcaaggatagcctgggcttcgtaatataacccgtctcataaaaatacatcactagaggcaatagatctcactctctgtcactagaattatcacagcaggagccagacagcagagaacactcacccaggggacagacaaggctggagaggaaagaaaacagcctgcacgcccctcacaccttcccctcttcctgtgccgcttagccagtgtgtgggttttgccattacctcccctgagcaaccccagtgtgcagaatagacccactaagccctgctaagacccaaaggggcttagccaaacccaagtccaaagctagagagggaacacaggccagccagcatctccgctgtgaatattactgtttgcttagctgtggcagctccaggctgatgatggctcactgtgtttggaggtctgacccagatcccacgagaggggccagccgagggaggcagcccccccaccaaagttccctgtgtctgagttatgtaactgcgtccaagtttcccctttgacactccggaggaggctgtggagattagccacaactactgctggcggtggcgcaaattgaaaattaaaattaactgtgacctgggaaccttcagtgcttttgccggctccagcccccacctctgtctcctatctcaaggcaggaagcacaccacagtgcctgagggggtgacctgtgagttaatcaagtgacttccaaactgaattggtgatgtatggggatttccatactgtttgcagcaggtggcattgactgagggaagatgggcaggatggtcaggcaaggcttttgcttgtctgggtgggattgggagtgggaaacactctgcttctactcaatttagagggcccatggctctcttatagaactgaacgtgtcgcgagtagaccaaccaaagtatgtttgttgaatgaatccctgaccgtaatgaacactcaaggtactcacagtcacagttcagttctttgagcattacttatgtctcagatgctgtgacactttgaacacaccgtcatgattaccccactttgcaggcaagtagactgaggcttcttggtttaagcaacttgatgaaacttagttgccacatgtcttggaacaaacaaggctggcatccagagcatatcagcttcccatcctcggggtgcatcctgctgactgtgtggacagtgactcaccttggacatttcctgtttctttcccacaggttttccaccaagtactggatgtctcagacgtgcacggtctgcgggaaagggatgctttttggcctcaagtgtaaaaactgcaagtgagtgctttttctttaagggactttttacaatgccagatgccagtcagtgtgggggatgggcatgggcatggtccagcaagtgtgagctcttgactctgggagagatgattttttttttttttttttttggctttgtattttagaaaggtcccaggcagagctgtgtgcttgaggagagtatcaagaacagctctgaggaaagccggagctgagaggaggtgggggaggggtgctggcaccgtgggtggggccggtaggggctctcattcgcacatgcagggccttcattatggttttgactaggaagtatttccccaccgcagtctcatgtgattggatgcttggttctccagcttgtgttttgggaattggatgatccttttgaacctggggtctagctgcagacactgggctataggaatagatgtgaattgtcctaggctggctcctttcccaccctgaactctctgtgtcctcaccgctgctatggcagaacctcatgctcccatgaccaggctttcccacgtggtggactatgtccccgagctatagttgtcccaggacttctgtcacagcagaagtaactaacacagtgttactgaccagtcatcagcaaacttttcttctagttgctctgtagtattttttttcctttttctctcttccttccttccttccttccttccttccttccttcttttctttctttctttctttctttctttctttctttctttctttctttctttctttctttctttctttcttttttggttttttgagacagggtttctctgtgtagccctggctgtatggaacgcactctgtagactaggctggcctcgaactcagaaatctgcctacctctgcctcccaagtgctgggattaaaggtgtgcatcaccactgcctggccctgtagtgggtctctggggcctctatgtgtcccttacagatgctcaaaactgactcctgtgtcttaaaagcagccacggacaattcagaaatagttatggcagtgggtttggtgcaataaaaccttcttatttatgcagacagtggacaacatggctccagccctgtggtttgcagatcccttggatagtttgtaaaattctttctcctctattctttctcattgtgtgccatccctgaaggtgtgttatgatttctcccactttaatatctgtaaatgttgtgtctcagcttggaaaggtcccagctaagatgggggagggaggacttgaactcaggcctcttaactcctgcttctctctttccatggcttcatgttggatgctaattctggttgggaggtcagaccaccctgaccttcacccttactcctgccttactcacattctgtcatgtctgacagaatgttaggaaggaggcaagggataacatggacaccagccataggttctggagacagaatgaaccaggttcaaaccctgtacctgccacttagttgtgtgaccatgggcaagttatctcacatttctgtttctcatatgtccctctgcatatatgtacacacatgccatgtgtccctttgcatatacttgtacacatgtcatgtgtcctctgcatgcatatatacacacatcatgtatccctctgcatgtatatgtatacatgccatgtgtccctcagcatgtatgcatacacatgtcatgtgtccctttgaatgtatgcatacacatgtcatatatccctttgcatatatatgtacacatgtcatgtgtccctcagcatgtatgcatgcacatgtcatgtgtacctctgcatatatgcacacacatgtcatgtgtccctctgcatatatttgtacacatgtattcactagttcctcaggttcaacaatcacaaaacagacaatataactgataggagacactcagtaagagtctctctctctctctctctctctctctctctctctctcttcaggtatcttgtaaaatgcctgtctggtggcttcacctgagtaagtcagccaggatgagctccctgctagcctgggctgtggagaggattaattatttccagcccctggagatcctttagctccatggtcttagggcagttgggatagtaattgctatatattagcattctgagctaatgtcctctgtggtcccggctctcacgtggccccttagctttctgactctaggatgcacaggggcaggtgcttgggtctggctcagaggctgcctggtctccccagtacacctgcggccttagagactcatcttgactgtatcaactcatgctgtgtcctgtggaggaaatggctttcacatcctcacacctgctgtgtagaggctttgaagtcaagtaattaggtgacagggactcaaggctgaacagttctcaagccttttcaattttcagcactagaggtgggacccggaggtagtttttccacccagccttctgttctaggagtaatgagcaaagcccaagaccctgccaagggtctagagaggtggctggggaaagaagagagggccagccccacagagctgaggtgctggaagccactaatactaaggttgggttccatctctgcttgaactcctaagaggcccataattgtaatcttggcctttttctcctctgaagagtattcatgatgttggcgcccactactggactactggagggagtcattgaaacgtcctcaccttaatatcactgttatctacgaacgcccccccccccacacacacacacactccaccttgtgcaaaatagctcctagcacatggaggggtgggttagaattcagatcaactctggttggatgatacctgtgacttttaccaatgtgctcatctattcaacagtaacaacagctgctacagctgttacagtgtcctggcatgctttgtccaaaccatatacctttgtcagctacaacagaaacaagacccaggcccatgttgaaactcatcctgtgaagaaagtctcccagggagcatcagttaaggagagagggtggacatttatttgcatgtgtttttcaagtattaaaaaaaaaaaaaggaacatattgaatggggtcttagaggattgggtgagggacaggaacaggcaatatgcaggatccataaaggacttaagactcagcagagaagttcgtctgagtggaaggaaggacatagaggaaggacagtgatgagtgacctttcagagaggtggccctgagcaggaggaggctggaggtcacttcttacagaagtgggcaggagcatgtcatcagtcacctgctaataccagctggatgcttagtatcacaggttaagaaacactggtctgtattgcttggttaccagctggatacttaatatcacaggataagaaaccctcacctatacttctatactgcttgggaccaaaaatggttttaggtttgagatgtgttctgactttgaaatgtctgtgtaatggaagcatttgcctatctgaggtgtttgggagatgaaggccaagtttaaatctaaaacttgaacttcctttgtgtagtatttttggtgagctcatattttaactctaaggtaaggtgtggatagtgcttcacctgtggtctcatgagtgctcagaaagtttcaagtcggaagtcattctggatttgggggttaagggtattaaacattaatatactatattaaaggggatccaggtactggaagcaatggcaggggataaaatggataaagtccccggatgggtgggacatgcctctggctcctgatgccacctcatgcttgccatgtggtcagttctgtgcctccattttctgttctctaaaatggcttcatgacatgcgcctcagtagtttattgtagagcgtcaacttgagaggatctagactctgcaggaggcacacatctgggagtgtctgaagtttccagagtagattagttgagatggaaagacccaccctacctatgggctggggacctggatggaatcacaagtgagcacaggtgctcatctatctccaattcctgactatgggggccacgtggcagccacctcattctcctgcctcccggccttcccaccacgatggaccacaccctagaaaagtgagctgaagttaatccttactcccccaaagtttgcttttgctgtgttttgtcacagcagtgagagaagtcactactaacactgttaaaaaaagaaaatgacaatgtaattggcctgctagaatgcaggctctttccccttacctggcccattaggagcgccaattagtgaaaactggtgccattgctgcctttacaaattaatgttgggatagccctccacccaggaaggcagatatgtctccttcgtgcctagccccctcccccctccacagctctcctcttaagtgcccacttcctccggaattatcatcagctgtcttgttgggagtctgaatagagagattaatgagctaataggaaattaagactcagaaagcaatttccagttatctaaatcgaggcgtttcatctaatcggttcaggagtgtggaagggagctgcgtgcagagaggccggatgtcagcactattctgcattgtctcatcagtacggactcagctgccagggtctgcccttgcagtgggtttcctggcttttggttgtctgtgtcccaccccacttagagtttcttccatgggggtctaaagcccctagatctcatttattggaaacctttctatctctgtctctgtctgtctgtctctgtctctgtctctgtctgtgtgtgtgtgtgtgtagctcaggccagcctacaactcagctagatagcccaggctggcctcaaacttacaatcatcctcctgcctcaggctccctccccattgctagggacatgtgccaccacatctggcctcatccaatttctcgtaggcaaacagtaatttacacacaagtattctgagtggctttcatggtagcaaaagaaaactgaacctaggatgtatttttctttctgtcctggctactactgctgtgatgatgatagggctgggattagagagaaggctcagtggtgaagggtgcttgatgctcttcagaggacctgggttcaagcttcagcatccccttccggctgctcacaactgcctataactccagatctgacgccctcttgtggcctccgagtgacctgcactcatgtccataatacacatgcacttagaagtaatgtttttaaagaagaagacattatcccaagccaccaatagaaacataacatttaaactaaccctgtatgttttagctgcccaaacttctctttcacaccagactttataacttgcaccagggcacctagccctcaatagtgtggtgattcggtgtgaccccaacaaaccgcccccaggaatgacaacagaaaaagtctatacacattgccagataaagaggtacctttgccactggtttcaagaaatgggtttgcagaataaatgaacggctcccaaccaaaggacccgctgcctacactctccatgttcaggatgtcnnnnnnnnnnnnnnnnnnnnctgcctacactctccatgttcaggatgtcagtggccagtcacttacccagcactcccacagatgcattaccaagccttcacgctctggcgataatactcccaccttaaggtttgaggatgacttacgggagtttccaagctcataactacagaatgactatagccactttccccattctagccaaagtcccaagtgcatgaacaaactctcttggtcagccctgagttagacacctagccacagaggcaagttggtgccagccagagcattgatggacgcgttcccattaaggccattgccagcctcgataggtgtgaacctgctgatcaattctctagtaagtggggcagcagcctcatgagatgcctgccttggctaaggcatgtgttccacctttcctgggctctttggatgcccaccctgtccaagtcccttgcctgcttggtagaacaggctgactctgctttcgttccacattactggtcactcatttgcacttagatggggctcctggcccttttacaattcggctgcattacaggatccactcactgcattttcaatcactgcgtgccctgtacagtctccttacctgtgtgtgctctggcactgacatacaacatcttgcttgcaaagtgcttggtttgcaaaatggctgtagccacaggtgatagggaagtgaaaagtcaaggtagccaggttggtgtgggagcccgttgctccacccttaccaaactggggacccatgggtgcagctgccgcagctgccgtggagttcctggaggcccgggaggctgtccaccaggcaggatgttggcaggatgtaattacgagcatgcgttttggagatcacccgcttgaagcctgaactcgcttttccatgaatagaaacactttacttcttgcaaaacccattctggggaattaagcatctcttatgtgcagtagtttttattattataggaaaaaattgaatcctattatagttgtatgtaagaaagagattcatgtaagcgggaatggggggaggccgtggtaataataatggtgatgatggtggttattgtgatgatgatggtgatagtgattatgatggttatggtgataatggtagtggtgatggtgaggaggagaaggaggaggaggaggaggagggtggtgctggtgctggtaatgatgacattaggcactgaagcctcatcgcaggcattttgctaaacacttaagaagcgtgctcgccttttgtccacgttacaaacgtggaaggcggccagaggttactatcaccccatgttacagatgagggagcagaggcctctgaagcctctcacagtgggatgcnnnnnnnnnnnnnnnnnnnnatccctgtctttggaagagcagctagtgtgccgatcaatcgatcagatgaccacttgctacagtgtgggtttctggggtccccatgagtgtgtgttgggactgaggacttgtctcagcatctgaggtaagtagagtgtcactgcctgagaggactcccaggtgggatttgatgcttccaagaggaaacggggtcaggagagtcttctgaccacacttgggttctaatcccagccccgttgcttcctgagtgtgctgatgtggccaagtcagctacccagtttgaacctcagtgtcttcctcagtaaagtgaggagagtcacaccttctgcctcttgaggtctcagagctaaggatggaagtaaggcaccaaggtcagatccttgacactgagtaggtcttcaagaaagccgtagcccctttcctgtttactatgggagcagccataattattgattctgtgcttgggagactctttcagactagaaagatgggctggctcgagtaccgagagtcctaatatgagcatgggatcaggagcgacatgggttttccttggccaggggatgactcagggctctctctatgcatgcaggtaatagaccctggttgtccaaagctccaacctgttcaatgcagctgacagtggctgccttccctctatgccctacttagtgggccaccttactagcatgaccaagctttcctcttaaatgacctgcttgccatgggatctgggtttgtccctgactgtagaaatgggaacctgaacaagagaacatatttaatgggattctaaatgttgacttcaccttgtgtttcttcagcccttaatacttgatgaatttagtcttgacattggggtgtcccttttacaagaaagaaggagaaggcgtgggaggatccagctaactcagcagaggctgagaagagggtggacctcagactcagatgcaggacatgaggtgccttgtgtttctgaataataagtcagagagatccccagacaccaaggaaaggtcctaggtgcagagaagtcacccaggggctaaggctcagacagtaaaatgttccccattaaaacaggaatacttagattgatcaccaaaatccatgcaaaatagtcaggtgtggtggttgaggtatggtggtccagatgtggtggtccaggtatggtggtccaggggtggtggtccaggtgtggtgatccaggtgtggtggttgagatgtggtggtccaggtgtggtggtctaggtgtggtggtccaggggtggcgatccaggtgtggtggtcgagatgtggtggtccaggtgtggtggtccaggtgtggtggttccagtactggagaagtggagactggccttgctggccagacagcctagatcacagtaagccccacatcacagtaggacaccctgtctcactgaacaagttgaatgtccaaggttgacctctagactccaagtatacatccatgaatgagatcattttccataacacccacctacacatacatgtactcacattcacacatgtgaacacacacacacagagacagaacgacagagagacagatcgagaaagagagacagatagagagatttgggcttcatagtcaggctgacctgagcagtcattagctctctaccttaactatgcaatcgaagggacatgaatggacacaatgcctgagcacggtcacagaggctccaggaaggtcacacatctctgcaaactgtggagcaccatctctgcacaaggcgccatctgccccgtgcaagccgggcatctcagagaggtatcaggtaaaacctcctctgcagatggctacctgtcttgtgattccaaggcttaataggataagcctcagttccgaggaaaagttacttgtgtggaacactgttccccaagggggctgctggctaaaggagtcattatcttcatcagatgaccaaatctgagtcagcctgatcatgtgactacctgggtggcccaggtgagcaaatgactatctatgcttgcctgggctgtgcagtgagtttcaagccagccctggcaatttggagagaccctgtgtttaaaaatattaaagagaagtaagctgggttctgggagcctcgcttaacaatggagtgcttgcctggtgtgggcaaggtgctagattccatccccagggtgaagtagatgatgtgaataagtcactgggcccaaccaagtccccactttctcctgtatcctcttgttcaacacgagttagagtttcagaatctgcttgtttcctacgtagagcagggacatctttaaaacccagttctaggacccaataaagatacttgttggggggaggggtcgtttttatacttttttaggtaggatcttgctctgaaatctgagttggcctggggttcacaatcctgctatgctagcctcccacatactgagagtacaggtgaactctgccgggctcagctggactcaggaccagccaagcaagctcggtgcttgtatgtaatctgtttaccctgagcaatcatgccacaatatacagatatggatacatccattttaaggtcaggaagactgaggcccaaggagatagcagaaaggtggggtccttgaatgcatacagaaagtatattgccagcttcctactatgaaccaatggccgtgctggatactggagtggtattggggaaggcataagaagaagaagaaagaaaaatcccttccttacaagtcttattgtctgcggaggggtgtacatcaaagcatccaaactcaactgtgtgccttcaagtctgagcaccttccccccatccccactgttcaaaaaactgcctcttagaagtcttagcaaccagatatggagcttgttttgtgggctctgcaatggaaaagacctcattccttttagaggtgtcctgagtacctactatgtgccacgctgtgtacctactatgtgccacatcactgtggcatggcatgtctagtcatgtcactaaacatggaataaacatgtcactaaacatggcatggctctctgctcaggtcactagaagccaggcaggaagatggatgggggattggcagacagtcggctatgatttcagaaggcagggtgtggctttctgattggaaggcagagtcagggaaggttccctggaggaagctatggtccagctgatgtgggatgggagctagcagcgctgtgtcaggaggaaacagggatgctcagggtatctagagagttagtgagctgcactagaatgagcgggtgcttggtgaggcgggagcattggccacagctttaaaggggcagaggggatgccagggagagtaagcaaattctctgaggtttgctgggtctcagtatgagactgacttttatcctgagagcaaggacgggcaaaggcagggcgtctagacggagggaatgctgggtaagctatagatgtgtcggtagaaggagccatggtggcttgtagacagagggagtgctgggtaagccacagtaaaaggagctatggtgggcgtctagacataggaaatgctggtaaagccgcagatgtggcagtagaaggagccacagtccccctttgtctctcatcctcttcccaccccacgtctacttcctgtagcccagtccctacttaagtgtcccagggcttcttgcaaagttaacaaaccaactccctcaccatttctagtgggctaattgctctgaatgttccagcctgagccttccagtctgattccggctcccagggacctctcatttgagccagtgtttctggaaacttcttgggaggctctcagcacagaactctgaccgttccatccctggctattcaacagcccagcagggaccagctcgccagcctgagattgcctaaaggaagactctacataaacgattgggggttggggtggtgcagtggcctgtgactcagatccctagacccagggacagcatgatgctaccttatggctcttctctccatgaaagaatgagggaggggtagagtagacttgcaaccctttagaggtgtgtgttctccccaccccatccccagacccaggaagagcagaattttacaacccaaagaaaggctctctggtactgcccatgttcagaaatgatacgtgagggagactggcaggcggatcacagggacagtgggtcaggggtgagaccaggctttcacattttgctctgcatgggaagcagagaggcaggcaggagtgtctgtggtcctactatgtggccagcccttgcccttgcaagctggctaattaagtatctggtcttgaatcacaaagacctatgttttgacaaccaatctaccttctgggatattctgtgccaggcattggtttccttgtctgtagcatgaggatcgtgataggggactctccaaataatatccaaaatacaaggtgagccaggaaccccaatgcgaacattacttattgtatgtatacacataccaggatgtcacagcatgaggcacccatgttattagcatgcagccatgaaaaatagacatgtgtttacatgacagtagtgcagactaggaagaactgactttgatcatcgagaatcttcatgaaagacagacagagctcaaagcagggagaccaagatagctgaaacctgttcaaagggacacatgtctggcaggttcacaaaccatgaccctcaaagcaataagagctgacactcaggggccatgatggcttcctttaatccagtttgattggatttgggatcagacacacctctggatgtgtctctgtggacctttccagaaaggtttaactggggtgggaaaatgtactaggaatgtggacggtgtcaccctgtgggactgaatacaactaggaaagcaggctgagccccagcgttcacctctctctgtagataactgtggatgccccatagcaacccaaccttctcaagtctcctgccactatggcttcctcagtatgatggagtgtgccctcggcccacataaactctccattcttatgctgcctgagtcagtgttccacctagaaagcaggaataatgatgatagctatttcttacagttgtaagactccaaggacatagtatatgagtaatgtgtagtatggtgactggtgactgagtctttgagttacttggtactgatgactaaggttggggtgtggcttttgatgacgaagttgacgatgacgacgacaacaatgattaatatcgatgatgatgaatatagccattaccctaaccacatcttagtgtatgaaggtaacgtggatgctgttggtaaagctgttgctactttcggttggaccacccagggtggaactggaagagttgcacctctccttagttatcatttgggttgccaaggatcatgtttgcggttcttgcctctaagcatctcatatactgctgtccacagggcctggagttttccagaccattggggcatctcatctgtccatctggttcttcctccactcatccactcatctatccacccatccatacacccatccatccacctatccactcacatacccatccactcaactcaacacctatttatccactcatccatccatccatccatccatccatccatccatccactcaactatccattcattcatctatccatccatccacccacccacccatccatctatccatccatacatccatccactcaactatccaaccatcaatccacccatcttccacccatccatctatcatccacccatccactcatccatccatgcacccatccatccactcatccatacatgaacccatccatccatccatgcacccatccctccacccatccatatttatatccatcaatccatccctctatccatccactcatttattcagcccgtccatccactccacccacctattccatccatctgtccaccaagccatacattcgtctttccttttctctgtctttcaggttaaagtgccacaataaatgcaccaaagaagccccgccctgtcacctcctgattatccacagaggaggtaagtatttaacacttgttaccctgatgtgggttctggcgctcgggcttccaaggcagcctccccacccagcttgattccagatacttcccggtccctattgggtggtggcagagacaggtcagtttcattcctgcagagacctctcctgatgctgccgctccttcttgtgatgtcaaaactctgctcctaagatgtcagtataaatggtcagatgttgcagcccaaagacctcaggctatgagcttctggatgccctctctctttctctgggggacagatgattaataagcatcaatgttatacatgttttgttttgttttgttttgttttgttttgttttgttttgttttgttttgttttacaacctcttgtttatggtcctatcctgtacctggctcctccattctccttgccgtttaggatatcttagactaaatcacatgaggtggaccttccagccacctcccagaaaggaagtaaaagtcagatattgtcttttgtttgggaagttctctaaaggctccttctctctcccctcaccctgtcatcttgtctgtgatagccatctgggtttgtttcttttcctttaagtatgcttgcttgccattttgtttctttctctttctctctctctctcctttccctccccctctccctctcttcttccttcccccgctccctctctccttccctccttttctctctctccttccctccctctctctctttccctctttctccctatctccttccctccttctctccctctctccttccctccctctctctctttccctccctctctctctccttccctccctctctctctttccctctttctccctaactccttccctccttctctccctctctctctttccctctttctccctaactccttccctccttctctccctctctacttccctccctctctctttccctccttccttctccccctccctcaggcattctctctccctacagtgctttgattctttgagcatctcagacaaagggttctgaacatgctcacctcccccacctccttccatccccagcctcccatcccttcccacgatgcattgagatctttcttcttctccctcccccctctcccccactgagtccagtttacgtcacccagctagtcctggtattggagcttgccctggtgtgagaccaatctactaggggtcacacatcattaaagaaatgaaacttctccctgggctttcaagggaagcctgttcttctcattggggcctgatcacgttctgtcctttcaatgcttattcaaggcctgatcttgtctcccctgattggagatcaccctctcccagtaaaactctttcctacagggtaatcctactttagctccttccccaaagcagtgaacccacacttctctttactcaaagaactcacacttctctttacagcaaaggtgtggtccatgcatgtgtgtgaaccacacacttcctgcccctgtcccagagatgatggatcagtgcctgcctttttgaattggatctggtgtgtgtgtgtgtgtgtgtgtgtgtgtgtgtgtgtgtgtgtgtgtggtggggggggagggtccagggtcctatgcacatcacaagccagaaggattgttcatgaacaagagttgtaccaactcacacgctgatgagggccaagccaacatcctgaatgagagaagctgggtaaatggagcctgggacactggaaagtccaggcagtactgctcagagagggtaagcaactatagtatccagacaggcagatttatgtcacctatgtctgtgacatttcaagtagaaagaagcctgtgtagttttaggagccttagactttctgctgagtgttagcgacttcctagccagctgtcagccactgccccatctctaggttggatggagcctcagatccgccagagagcaagcttaagacacaagcttaaaaggggctggatctcccatttccatcctcccatctcccccggcattactcagctcagacatggcctgggagtatccacccagtttaagaatgaacctaagagaagcttcaggcaagaagtgagttttcccctaaagcaggctcagagctgtcagaggcagttgggttttgatgtttttcccaccttgggtctccatgaagagagaaggatgggaggagtgtttggctccctcctctcctgcctcttcccactccgcaaccttaacacacctagcgtggctattttgaaacctgagttcacacagctcctgagccccagtccaaggtcagcatcactggggaattttgcctcccaccgaatcccacccgctagtgggtgctttgaaggttaactcccccaggaagttgagacccaggctgtaggagggtgagcctcccccagagtctggtatttggagaagacctccttcctcccacctgccttcaaggccaagctccctgggccccaggagggctggtgtcttgcaagtaaatcaaagagaactttcctgaagaagtccactggcttcttgcatctccccccaccccccacctccctgttggtgggaagttgaaaatagagtctgtttccatggtaatggcagctcaggctaagcagagaaattaaatccctgggtcagagcaaagctttaattctacatccctccccacaccccccccctccaacaaaacacaactaagaagaagaggtgcaaggcaggcaaatctgaacttgagctactgttgcacgctgtgttccttatgagtgacagaaataacaagaggcaggcgcttgaggatggagtccttctgccccacaggaagcagctatttagcatcacttgcctatgtgcccagctctggctctggatgtgacacccagggggatggctaaaggagctgtgccactattgtcaggatccatagttatttgggacaaatgcagtccagtgtgtggcagttttcttagtcctgataaactccatacataacaaaagacatcctaacgcccagttagggacagggacagggacaggtgcccatcatgatgcgtgcgctaattgcagacctccagggatcagggacctcttacattgcaagcgaagttcaaagtattaagtcctgctcagtagcatccgtgtggagaaaaaaaaaaaaaaacaaaagagagcagcttcccgtttctcttgtccaaaaacacatgtgaggggataggtaattaaaattaaaaatgtctgaaaaatatatgtagatgctgaggtggtggctcagttgttaaatttgtccctgccattctgccacacatgatgaggacctgggctttgagccccagaaggcatgcccaaatgccagggtgacaggacacacctgtaacaccagtgctgggggatggagtctaggtgggcgggtctctgaagctcattggctagccagcgaagcccaaccgattgttccaggttgagtggcagagcccatctcaaaaaattaagggagggctggagaaatggctcagtggttaagggcactgactgctcttccaaaggtcctgagttcaattcccagcaaccacatggtggctcacaatcatctgtaatgggatctgatgccctcttctggtgtgtctgaaaacagccacagtgtacttacaccaaataaatacataaatcttaatttaaaaaaattaagggagagtgggatcaaggaaagacctagggtgacccctgggccaccacacgcatacccacatgtatacacacccatgtgacacatctaagtgacaaataccttagtataccttgcatgaacacacacacacacatacacacgcactatgcacataatatgaagagtataaaaaccacagagcaacccagaacatttgtcatggtgattcatagctattatttctagtgtttctagtgtcactggtaggtttcaaagtgggatctgacctgggctgtcctgacaagaccaaagccaacgtgatacttagactctctctgttgtttttaccctacggacccagcaaggttagtgcgaacggagtcggtgccctgtgacatcaacaacccggtccggaagcctgcccgatattcagatctccacatcagtcagactctccccaaaaccaacaaaatcaacaaggtaaggtttggctttttcggggtgaggggtagtgggagggcagacagtggtggctgggccagatggtgggtggaaagggagagaggctggagatggggtgtgacactcactctcctgggctttcctggttctgggtggtttatatgcagcaaagcttgcagggcggagggaaaccatcctgtgatcgcttgaagagatactcgaggcagactgcatctggtttagaagtaggcctatggaaatgaggcaggatgaatggggacgaggggggcagaagggagtttccatagtattccagaccctggctgttctggctgggatgccccccatctgccagagcagctgtgtacacggtggtgggctttctgaacatctgttgaactaagggctggtgatcttcttagcttctggtaggggattagatggatgggtagctatcactggggggcccttagcaacagctggattaatgtcttccctctggcggatggccagcagcaggcggctctctgcacctctttccttctgacatgatccgtctatgttgcctttggtgtgtgtgcctttgggctgggctgagattggcccaggaacaattccaccccatgctagaagccagttttgcatatgtcaggaggtggtttcttgaggctcacaaagcctcttgttcattgtgtcgaaggtggataatgtgtggtgtgatcttagagatggggtaagtcacagatctggaagcaagtaccagatgagcatcttggtgacagtggagcttccccttggcgaagtgtggctttgcttccccgagttggccgtggagaggaagatcccttcaccatcctctctctcctctcaggagcaagagtgggtcttaaagggcgttactcaaaaggctgtcatcctgtctaaaacccacctactggttttttgctggtggctgggagcaattctaatttatgtatttcttttccaactttcttgtgcatgtgtgtacgtggctttgcgtatctgtgggtgctcgtgtgtgggccgcgtgtgtccatgtgtgatgacacacatgtacatgtgtgataagcgtgtgtgtgtgtgtgtgtgtgtgtgtgtgtgtgtgtggtgtgtgtgtctgtgtggaggtcagaggttgatgactggaacatccttgtgggctcttgaatcttattgaagaagggcctcttaattacatccagagcttgactctagggctatttctgcttttgccacagctattggccattgtctttattgttagttcttggggcagtcacctctggctccttgtcacttcaggtctgcatttgaaagaacctgtgttctggggtcagggcaaactgccaccagtcttgatggctgtggaactctaggcaagtgacttgctctctctgggctcaagcttgaagttgtcctctatataaaatgggcacattccagctgtctactgctatacaacaaaccacccccaaatcagcagtgtataaaacccaccctttcattatgtttaccgtctcctggctagaggctaggagttgggacagagaaccatgggatggttgtgtgtgtgtgtgtgtgtgtgtgtgtgtgtgtgtgtgtgtgtgattttgcttttgtcgtgggatatccagaggctctattgggaaaccacttacaactggtggctagtgacatccagaagcaggccaagttcgcccaccatccgctttcccgtgactcaagctacacccaccctgtctgttgctacttttgcaccacgataacagcagcagagttgatgagtcacaagaagacctaggcagctggaaacccctgatgtttaccaccaattccttcacagttttacaggattcttctctcttagggctggtgcctgggctggggaggattaaagtcagccagaacgaccacctgtagcctgttcttcctcccaatgtggctgcctcacggcatctgtgttccttacatggtggctcatgggacctaggcagtattatttccagcgtccattcctaacgaggcacccacacgttgtgggacttgagattaggcaaggtagactccagctttgggtcactattttatgcactcacagtggccgataacaacaccagctctggagagctcccccccacccccaaccccagacagcattaaataacatttgaaaattctctgtgcctcctggtgcagactgatgctcagggaactgtaacaagtgttgtctttgatctcagggcttcaagcaaaacatcaagccagggcccctttcctttggttgttttgtgggagtctcaaggctggtctaaggggatgaacacttggttagtgtgtgcaaacctccggcttccatctgtggctctgctgagaggagaaaggaaggaaggaaggaaggaaggaaggaaggaaggaaagaaacttctaaaagggactgtccccctgggacagctgagggggctcagttagcgtgtccctccagacacatatctatcttaaaacccatcttttcttctgtgacactgtcagggggcaggagttcaaagccactcagagacctttccgtctggcatagccagtgctggagcctcttgatgtcagatgggccaaaaacatggggcagacagatgagccacagtgacatcgttctgcttgtctgctaggaggggcactcgggaagggacagaaattggcctctgcacagacagcggctttgccacagaggtggacaggctctctctcgtcgggctgggcttttttttttcttttttacctcgttcttgtcttactggcttcctgcagattctcgttgtcaggcgtgatgtggttagtgaacagatttcacagccaatttgctctgctcccgtttttttttttttgttgttgttgttgttttgtttgttgtttttttttttgtttgtttggcctcttgtctgggccaaatccatcccagttcacagaggctctgattcctcacctggcaggatggcagaaggtagatttttagagtcagaaagcttggttgggtttggttttgtagcacagctccttaatctgccatgctgcttgtgagcagaaccagctcagtgcccgtttgcctttgtttttccttccatagaatgggcaaggtgggagtgatggagaggattggatgtgtggggtgtgtaaaggatttagtctaacagtaggtgctcaggaatggaggagggtgaagaggagaaggaggaggggaaggaggagggagagggagaagaagaggagggagaggaagaggaggaaggagaggaagaggaggatgtagaggaggaggatgaagaaaaagaggatgatagagaggaagaggatggggaggaagaggaggagggagaggagaagggacaggaagaggaggaggcaagaggataggagaggagggggaggaaggaggggaaacacagtaatggaatgaacaaagacagaagggttggaggaaaaaggtaaaggaagaagaaaggagaagaaagatgaaggaaaatggaaatgagaggattaaatgctgaaaaagaataaaagaagtaaaagaatcaggaggaagcaacaggaggcgcgagggcatggaggagacactgagggatggaagaggcaagaaagtctgcataaggaaagaagctggatgcagtccggcatctgcagccccagagactattctgtaggaccagtgtccaccactcagggcatcaagacagccaccctcagcggcaaccaaggccttggctcttcctgctgtgagcaggaggttggaagatcaggcatgctggcttgttacagttacagggaacagagccctatctagccagctcgttaaagtgagctgctgtaagggtcgccaagaggcaagacaagaggcaacagcagagaaggctactcttgaggagctgggctctctgaaagtagacctgggggatggccttaagtcaggtgggctgcctgaccccagtgacaccaggactttgcttttaaagatccattgtttcaattgggtggaggttggtgtgtgcacataagtgcaggtacccaaggtggccagaagagggcgctggtttccctggagctggagctacagcagctatgagccttgtgttatgggtgttgggacttaagcttgtacacacttcaccacggattcatctgtctagccccagacacagttgttctaaagctatgaaaaggtgaagccgctaaaacaacccaaaaactcttttatgaaaaacaaaaaacaaaaaacaaattccacccgatttcaaaacggaataaatatctatggtaatcaaaactaaaagaaaaatccagagggcaaacaatcccaggagaggatgttcactgtggctgaggctgactgctgaaccatccccatgtaccattctcactggcccaagagactgagatatgtcaccacacagaacactggctcagatagtaagaaaactgctcagggtagggtgtgggtgtaaaccggctcagccactccagagagccacatatgtgcatacaaacctcgttataaatatttatagtagctttaccctcacacacacaaaggaagcaaccccaaccaggaagcagcagcttagatgtccctcactggacgataattcacaaattgtgcatccaaacggcagagtatttctcagcactgccaaattcgtcatgttcataaagatgccttctcaaggtttggaagaaggaatgcctcttcctgctcctggtggcttctacagtccctgacttctggtggcatccctctagagtttgcctgtcttcacatcctcttctcttcctgtctctcctctttccgtgtctgtcatgaagctattcatccttagagtcagtacccagtctgcctctcgatctttgtctttgttacatcagcaatgacccttgttctaactgggattgggtcctaaacattagggtgatgtgtcttgcaggagggcacattaaacccactgactgctctttgaagttcatccagcgaggccgttctgcacacacactgaaggacttcatctttgctggatggagcttcccttggagctggtctgagggcgagacagataatgcaggacccagctgcacgctggggaagatgccgaaggctcactcccacgctctctcgagctgccaggctgttgattctttaataaacacttgggaggagaagtgtcagagttggggaacagttctctgggcacctcggcatggggcccctccagatcaaagagtcacagagactgcacggctgccacctctgcagatttcattatgtggcaacctctcctacctcgggttccagtggcgagcaggaacgagattccagaaacttccctctgcatctgggtgcaaccccttgaagtgtactggctcgggtgttttgtctctgtgtatatgtgttggaggccatatacctgagcagccagaggttgactttagatgtctttctgtgtcacctgtcactctctaccttattcttgttttagatagggtctctcacagatctaggctagactctggaaggatctaaaaattgcagaaggggcagccattgctgaagaagctggcttgggagccccttcctgcccagctcatcctgtctgctgcgtctctgcctccccacctgtccctgacccctgccctgtttttctttccacaggaccacatccctgtcccttaccagccagactccagcagcaatccctcctccacgacgtcctccacgccctcctcaccggcaccccccctccctcccagcgccacgccgccttctcccctgcacccctccccgcagtgcccgagacagaaaaagaacttcaacctgccaggtacttctgtgttgtggaaacaggtggataccatcagaggggaagagatgggagtgggttttggggtccttgccaaagccagccaggatagggggccagcccttgcctgaaagcaatgggttgataatcagagagggtctgggagacttgcagatgtgtgttcagcagacacgggacaattgccatgcgatgtcacatttcatcttttgggggaatggaaagtaagactcatcggctctgcctgacagacaaagaaactgaggcacggagacttagaggcatgtccttcgcttagcatccaactgatgtctttaccaagctaagtcacaagacagaggtacctgcccagagttggcagttgttcagtgagacagactggttgggattggtagccgggtactgtgctgaggaccttggggacaacgtgccagagcagggttccttctcaagtctcagcccagctcccagtcttggctcagaatggagtgtatgaggccctggatccaagatccccatctgcttatcctgctctagctgtgtgacctctggttccggtcgctcagctcacatttccctaagcaaatagtagatgaaccgctcatgagagacccaattgtccttagacccgagaagggtctttgtctgccttcaagtggatcagacctaagactcttgctgcctcctcccggaccctcccgaagggcccaagaatgctgtgccaaccagtttgtcattattatggtactccaaaaatggctggtgaggttgccagtgtggaaagtccttgccacagaagcatgagggcctgagttaataatgtttaagaaggaaggaaggaaggaaggaaggaaggaaggaagaaagaaagaaagaaagaaagaaagaaagaaagaaagaaagaaagaacgagcgagcctggtatactgatacatgcttgaaaccccagcacgggggagctcgaaagagatggatcatgggagctcactggcatccagcccagtcatattgttgagggatagctgaagtgacagcatctcataaaacaaagtgaaaagaaccttgggaatggcacccaaggatgtacacacaccaaacacacgtgcactcacatgcacttgcttgcacgcacgcacacacacacacacacacaaatgctactggagtcaccctctggggaagctatagtttgtcggctgaagttttcaatggattcagcaatgtcacctctaggaatctctattcagacgctcatgcaagaacaccaggatctgtgtgtaaggacgttagccattgccgcagtgaagagttgaaaccatgtcaagttcccatcagaggaaaggatgaatgtactggaaggatgctcggccaccattcaaagggactcggtactctaccgaggtttcccagcatgcaaaggggttcattgtggggttttaagtgggaagaataagatatataaaataattggtatactattcttgttcattgtgaattcttttcacatattcgtgcattgcaaatataaaatcggcccgtacttcatggttgttgctagtgagcagaggggttgtgacttccttgtttgcagtgttggggattgaacctagggccttggttgtgaggcgagcgctacatgacagagtatcatgcctggctcatgtgtgtagctcataaaggaagcttcagtgtggttctcactctgagtagctgcaccatttgatatccccaccggcacagaaacacataggctttttcttctcccctcccctcccctcccctcccctaccnnnnnnnnnnnnnnnnnnnnnnnnnnnnnnnnnnnnnnnnnnnnnnnnnnnnnnnnnnnnnnnnnnnnnntccccttccccttccccttccccttccccttccttccttccttctttccttccttccttccttccttccttccttccttccttccttttttttttttttgagacaagctctcagtatgtggcccaatgttacctcaaaaagcactatccccctgcctctgcttctggagcggtgaggttagtgtgcaccaccacacctggcagagggcatttgcctcactaccactgtcatgtgtacgatggggagtgcatgcaagcacgtgaatataagccatggaatgtgatccctaaatgaaaaacaaaacaggtcttcccctgccctagcaaaagctcccaagcatctggctccccgtcacactcttgactctgggcatctggaggttaggaagggagctgggagtgtggctggcggtcagatattgagttctcggaaggctatgaaagtcagtgcctggaggtaacaagatcgctagagttgattgatctggaccactcaggggtatccaaaagggtctgtgaggttaacaggcaatttaacatacctggtgaccttggagcacagggagaatgagatgttagcagaccaactgtgatatatgctgcctgggtgctggtgagcgcatctggcccattggatttatccctgcttttcattcttccctgagcctctttgccctgtggacaaacccaatgtggggcccaggggaacagctctaagcatagatgagtctgctttaggactccagctttggtctgagtgactgtgatgtctccatggcaaacggcatgaaggggtttctttctatggaaccaccttagcacacaccatgcgcacgcacacacacacacacaccaacattcatgcacttacatacatgcacatactcatgcacttacatgtatacacacatatactcatgaactcatatgcacacacacatatacttatgcacttgtccatatgcatataccacatacacatacacatgcacgcacacacatttgtccatgaacttacatgcatacatccactcatgcatttacatgcatatatacccatgtacttacatatatgtacacacacatatactcatgtacttgtacacttgcacacatcacatacacacacacgcatgaacttatatgcatgtacacacaatgcacttacatgtatgcacacacacatttactcatgtacttgtacacatcacatacatacacactcatggacttacatgtatgtatacacatatgcccatgcatgcacacacacgtacatgcagatatgctcatgaactcatatgcacacatacacatatagtcatgcacctgcacacatgcacataccacatacacacacactcatgcacttacatgcctgcatacacatatgcccatgcacttacttgcataaacacatattttctcaagtgcatgcatgcacacttaaatacttgcacacatatatgcatgtatgctcatgtacttacatgcatgcacacatactcatgcactcacacacacacatacacttatccacttacacacgtgcaaacattctcatgcactcacatacacactcatgtactcacatacatgcgcgcacacacacacacacacacacacacatgctcacccacttacacacatgcacatcacaccaggaaatagaaaattctggtgccttaaaagaggagaaacaagacgtaaagccgcctctggtggctacagcaagatttcgttttctatttcttatttagcctcttaggtatatgcagtacatggttagtaggtcacccctttactcgtggtacctcctgtgtctggggacagggcaaagtggggcccaatcttgcacaactgctgtgtgtttatggttaccagagcaatgccatatctggatggcaacatttcaccaaactgtttcccatcctctctggctttttggttctttcttccttttctctctctctctctctctctctctctctctctctctctgtatctgcatgtatgtatctctctgtgtgtatgtgtgtgtatgcagtatgtgtgtggtatatgcatgaatgtggtatgtgtgcttgcatgtgcattcatgcatgtgtgtttatagcatgcatgtagtatgtgtgcttgtagcacgaatgtagtatgtgtatggtatgtgcgtgcagtgcatgtgtgtgcatgtgagtgtatgtgtgtgcatgtgagtgcatgtgtgtgcaggtatgtgtgtgagcgcatgtgtatgtgtgcatgtgtgtggggtgtgtgtgtgtgtgagtgcatgtgtatgcatgtgtgtgcatgtgtgtccatgtgtgtgtatcagaggtgatattatgtccccccacaccagtcatttgtggccagcatgttgaccacatctgagtctctgaatcaactgtcacgcgcccctccgccagcaggctacctgagatcccacttggtcttgggccacactttctttcctcagaacccgctgccaggtcgctgtgtgatcatggagatttattcacttgctctccatctagccatctaccaatgggatgccagtgccataagaacaggaaactagactgcatcactcactctgtggcatagcacgatgtttgttgagtgactacatgaatgtgctaatggcttaaatcctatgcccttcctaggattctagcttcttttcgtcaaaatgtggcattgacgttcagagggcatccatctattggtctcattagcaagtacccattgagcacctactgtgtaccagaaactcaatgtggaactgtgaacaagctggtatagctctgtttaagagttctgttgcctctataacaaaagatcccaaactgaacagcttaaacggcacaaagacatcttacatttctcaggttagaaactcagaccagccttgacagtggagaagactcaatggctcagtgagctcaggttaccctagatgctatctatgagtttgagccattttcttgttttgttttgggtttccccacacccccagattctggaagctgcccaccctcctgggcttgcgcccctcttctttcttcctgggcctctgtggtcacctgtctgtcttcactgacattctttgacctctgaccttctctctcacaatgacctttataatcacattggggtcatccacacagcccaggctagcccttgtagcaagagcccattgcaactcaccctggcaaagtccttttttgccacacaaagctatgtagatcagatcagatcatgagcaacatttattaaaaagaaaaaccctatcggcccacctttactgcagatgaaagagtcccttggtgcagccagagccaggcctgagatgcaataatttctcattttgtcatattagccttttgttgacaaaatggctgtgtatgggattgggattggagtgtgtagtccacaagcctggaccccaaaactgcgatttattgatttattgatttttggatagctgggctttgttactggaacaaattatttcctggtctgcccacttatggttaggaatcaaaataacctcactgacattctaagactatcccagagtaggaaaagggctaagccaagaacttctactccttagtcttcaataaaaatcggcgattttagtcagttatcaacagatggttcccacctatgtttgcagggacttggggctcttgagacactgatacttactgtctgtcctgaaggagcttgtcaatcaacccaagcctcaaggggagtgtttcctttgcacccgcctcccaacaagctgtttagcccttgaagctacctggccgtctctcagttctaaatcactcttgtctattccttaagagagccaagagtccatttttcatcactggtgaatgtgttcatcttgggaatccagggttcctggatccttatgaacgtcacagtccaaagatgtccatgtccttgtgtaacacgcatcctcggtctccacgagtcttcccatacactaaaccatctctaggtaacactcaacactgagaacaccgtgtgaatgctgtatctgtagtttctatgtattgtttaaggcaactaagaaaaaaaaagtacacatggttggtacaggtgtagtttattaaagacttgagtcctggatcagctgagcctgcagaggaagaagaaacaagatcccagatgtactcagaacctgcttctgcgtagtgatggtcccaggatcatgtccctgggactagtattgtctgtattttgtctgtgaacgctgagatgtggaaaggtttgcttggattttatgagggatgtatgtaaacaggctcagcttccggactcccggcccagacccgggtccttacagggaggagtcaagtggccattgtcagtatcattatagacactcaagttgcttctggtgctgggttctgcagtcctagcttgtatgtcaccccatctctgtcgaacatgctgattcggggaaggagataagctatctggcctacctacgctctctgtactcaaaggagcaagtggctaactagaaaccttggcctttggcgagaggaccacaggccaagtaagttgtcaagagaatcggccagtgaagtccgggaaatgacatttgtataattgttctcaataaacgtggagatcgtggtggctgcgattaggtctcagattttttgagggaacagactatgctgctagataggatcccttaaggggcaggagaaaagatcaggaggaagtgacgtcagaaggaagccgagacggaagagaattgctgggttgtactctctgttaacagcactctctggggggagacaaagcaccttcccaagcgactttaggctggaccagattctccagggattccaaaccttgcaccagggtttgcagctcttgaagactcattttgctcctccagcctctggtctgtaaagggatctgttagtaccgaggggagtcatctcattcgttctcaatttattagaatgcaaagaagaaaactcaatacaaagtttggtgctgaaaatttgcataaaggatgtgtaaaagcaaaaattattttggattatggcttcatggtggtgtgagtgtgtgtgagtgtgtgtgtgtgtgtcactgtgcctctcagagggtatcacctgatttcatagactgtgagatattaaatgcttgggtcctatatgttaccactcccttgtaattcagggtgtctgccaaagtgtggacactcttagggtggacagagaatggttgtgcggtaatgatggagaggaggcatggtacccatcatgctcgggtggtccttaaactgttttttctctgtcttttgcaagcttcccactactacaaatacaagcaacagttcatcttcccaggtgagtgttctgggaactggcagtctgaggatcagggattgcggggttggggggcctggcgaagagaggccaagagccgagtggagactagtggggtctccatactccaggaagaggagaagctaacagtggaagatcccaagggcaccagcacagtggaggtctagaaggtcagccagtcagagggacttgagttgtgaattgagtgacccccttgacccaaaggggagtgaggaggattcgggtatgggcagcagcagatgcttaggtgccctgttggcagtgaggaccagtattgtggatctctagtatgctacccagtaaataaagcccaagtgggcaaggcagggagaaggagtgttggccaatattgaaacccacgtcaatagggtagggttgcaggctgttgtgtctctggggggtaagggtcatggtttgatctctacgtatgtgatctctgacttgcagatgtggtgcctgtaccagagacacccacccgggcaccccaagtcatcctgcatcctgtcacctcaaatacaatgtaagtgacctcacgccctaccctaagcctcaataccttcagccttcttggtctctctgctgtcaagtttcctcagacctggaggatatgggtccaggatagaaagacacagggcagataggaggggtctggcaccccacactgagagagaagtgacaggaagcagtgttagccccccttgtcctagctcttcctgtggctctggccctctgtggcaatggtagcgtctagaagtcacaccatcacctcaaagtatcctcttcatgattccagagaacagctagacttcagtttaaatcatggtctcctctttgtagaaggtgggcctggtgacacttgcccatcatcgttgatctcttaggagatcaaagcaatgggaattacaagttcaaagtcagcttgggcagctcagtgaggtgctgtcccaaatccaaatatctaaaaggggctgaagatgtactttggttgtgaggctccagattcaatcctgagtctggagggagagggtggagaagaagggggagggggagggcaaaagaaagaaagagacatgaggaaggaaatacagttttcacctgggatcaataaaccctagcccatcagataaatcccatctgtcatttgtttgtataaataaagttttattgagacactgccacgctcattacaggccctcgacgggctgccttctcagtacatcaggagggttgaggggtggtaaggaaacatatggctcacagaagtgaaaactactgactctctagccccttgccgaaagcctaccagcctctgttattcatacccctataaaatgaacaaaagttaatttgggaaaatttagaatagtctgtgaaaaaggaagggaaacttgccgcttggaggcccaccctgctagaatgttctagtgagctctcttgtcctggtcatatatttgttaccacttgtacaatcctgttttatctttaacaaggtgacactgattctcccgtgtcattctgggctctttgtaggcaaggtcttaatggctatagagtgtcatattgatgtgaaattcagatctccctgctgtaaacatcatggtcacagatgccctggtgtgtgcatgccccagatgaccctctgctcagacagccagagaagataccctcctttccttttgtgcgtgtgcccaaagtctggggcatgctgggatgtgatgagattcgcaactctcatctccacccgcttgttctttcttcttgcctccctaatggctccatcccacttgacctgcattaggactttgcaaagagccggcgtggtgcatgtctgaaatcaaaggagcggtgtcttgccagcgggtactttgctgacctagatctctgggtcttttctctgccgctcacaaaccagctccatgagctgcacaagatgaactccaagttattaatggcagtcagagttactgcagtggtgcagggagctgtctgtgatctgcttaagtgtacaagcggggtaatgggcaggaaaactgcgaagggagctcactgaatagccccagcagctggagtcccgccttgcaacagaagtgggtgggctgcccttgggtggttaggcgaggagagggactcctgtatcccccacagacttctatcccacctcctaaggctatgccataaataactgatgaacatgtgtcacccatgacaactctgcccctcctgttttatctcttgcacagaggtaaattaactcagtcttcaggaccctcagctccctgtgatctgaggagaaacttgccccacaataggatggataggtggaatggctagatttccatcagagaaatatgaaggggacagggttttctaggctttgtcctacctgttctcagttttgtatgcagtcagtaatcgagctgctctgtgcccagggcactccattaaacagcatccttaagtgtagaaagcttctttaaacactgagtgcatcccatctccccatcatgagactatgcatttgaatggtacctaaacattcttaacacacaggtgattataccgtcaacacacagtgtggccctaataccctttgtgtgttcacacaactcaagacaaaccctacgcacaatgtgctgccacacatggacacgttcctctccagcacccgtgcttagaatacaactgtggctttcaagctttgcacatgtgatgcccacgcccacccgtgtctccccacccagggaagctcttccttcccgttgacacgtcttgattccatgggattggccaattaaactcccaacactcattgtctgagttgctattttattgttgtgaagagatgctgtgaccaaggcaactcttataaaggaaagcatttagttggcgctgccttacaggttcagaggtttagtccattatcatcatgggagcaggcatggtgctggagaagtgtctgagaatggcaggcagagggggagggggagggagggagggagagagggagaggaagagagagaaagagggagagagagagagagagagagagagagagagagagagagagagaaaaagtcagagcagcaacctggaggtaggagctactacagagtctaaggaggggtacagcttactgcctcattccccatggcttcctgtttctttattaccaaactcagaaccacctgcccaggggatggtgccaccccacagtgggctgggccctcccatgtcaatcattaaaaaaaagaatgccccccagacttgccagcaggccagtctgaaggaggcatttctcaagggaggttcctgttcccaaataactctagcttgcatcaacttttgttttttttaaggaactaaccatcatagaggtggcgttttaaccctgaataaccccaaccccaggggatcagctactccttgactttgataggtaccacataggtgtgcacaccacatgcacacagacacataattaaaatcaaaactaaacttttttttttttttggtaaaaagaccctcctaggaggctctgaacctgaggttttgaaacgtgattttattctttcccaatgtacatttagacttcagaggatttgctcannnnnnnnnnnnnnnnnnnnggcacacacatactgtcactgggcgtgcccagcccgggctgcttaggtgtttgacatttctccctgtccgaatcacctaaatgtggtttccttgagcctcagtgtccaaagccagaaaccttagtcagttatgttagcaaatgggccacatcctggctactggactttggtcacagtttgggtacatatccctccccccccccaataaaaggaggctgctacactagttaaagctgaagccatatagtgagcccggagcaaaccaggagaatttgtttttaaataatggtcttgagagctctctgtgtactcagctgtgggttgtagacccaggtgttgaaatgatttggagaaaaggaaggttctgtggccatgatgatgcaccgtttaagattcctgagcatgtcttaattcaatccagggctctaaggatcatctaaggtggcttttcttttttgtcttttgtttttctcgtatttccagcttggaaggaaacccattacttcaaattgaagtggaaccaacctccgaggtgagaattggagactggacgatggctctcgctcgaggttggcaacgccacctgctgtcctcagtgatgcagagggctggggggcggggaggtggttcgcagtggctgtttgatggatatcctcactctaggacaattaaggagctgtagcccctccaggcgctgagcctaatgggccgttctattgtgtgcatcctggcagagccagttggagggaaattggcctgggatttgcattttttaggtaaaaaaaaaaaattagctccgggttggggagccataagagggatgtgccccagtgccttcgaaataacgtacaggagcaggtgggagccttaagcatatcgccttggcagtgcggtgggggaagttctgggtttccatccatctgtggagactgttgagggagtaaagatatgtcctggggactggccatcggggctgtcatcttggtcctactgtgtgccaacagggctagaagcaggactctgggggaaagtcccaaatcccattcctagatagtcatggtcccttagaactgatcgattctgggagctagagtgtcctggcttgattctgatgtctgctctggtgtctcccagccacttggtcttaaaagagccacagagcttggaactgtgacctccgccaatctttgaatcaattccaaaatctgcccccctccgcccccacccatccccaccccttggaaagctgacagacagagcccaggttggtggttgtccattgtcccgtgtcccatgaagagaccatcattggggtggattcacagaggtagaataaagagggcattgcattgcagcgatccagaaacctggatctgaattctctgtccctctgcttggctgtgatccagagtgagaacctcctagcgcagccaacagcccagtttgcccaggattgacaggtgtcactttcagtgtgaaaactacgaagtctagccaaaccagagtggttggagcccttagcttttctcctctcttagcacaagacagtgggaccacttgctgttcctttaagaccttcactgtggtttgattctaatccaaagacacctggggaatctaccgtgtctgtgtatggcaatatatcctgatctctacagccgaaacagatccctggggagggtggagctggggtggccatgattctgagccttcacccttctggccgtagaacgaagagagccacaatgaagcagaggagtccgaggacgagtttgaagagatgaacctatccctcctctcagcccggagcttcccacgcaaagccagccagaccagcatcttccttcaggagtgggacatcccgtttgaacagctagagattggcgagctcatcgggaagggtcgcttcgggcaggtttaccacggacgctggcacggcgaggtggccatccggttgattgacatagagagggacaatgaggaccagcttaaggccttcaagcgggaagtgatggcctacaggcagacgaggcacgagaacgtggtgctcttcatgggagcctgcatgagcccaccccacttggccatcatcaccaggtcagtccctcgggctccgatgggaacatctaagggctttgtgcatgttaatagtgtcttcgggtcctccatccacggttttctcacaatcctttaggtccccagaaaatgcctttagggttttagggatggctgggaagagtactgcattgggagccagaaaagccaggcatgattgatacttgtgtctcattaggtaaaatgagtgaattgctttagacatagatcagcctgtttgtgtagcactcccagtgctatgtgtgaattggcctcacaggccacacaggttcggtctcagccagttagttctgctattgtcgggaggtgggggcggggggcacggggaaagcagccataaatgatatatgatatatatgaccatatggtcatatgatatatgtgatatattgcgtgacagtgttgcaataaaactttatttacacacccaagtagtgggccagctctgccccacagtttgatctgagatgctggtgactgtgatcgtggctcttgatggtttacagagtgtttgtggagctattgccaccactgttctgagtatcctgcattagtgggctgcaggggtttggggatggggtgggggagggtagttaacagagattgacttttaaaaaaatggcagatgactatctgatgtaaaacgttgtccttcattcacatgtgaactcctatagatgacatatgaacacccatctgctggtgggtactgtcagccggggtgactcagttatgctgcacacagtctccagctcagtcacgcccgtggtggcctctggtgcccaagctcagccaggggtcaaaggttaaatgcataggtactttccatgcaccctctggtcaggctctggctgacatccgttggccagagcatctcctgtggccagctggattcaagtgatggaggaagttgctctctgaatggcagactctgtagggggaggaccatagatagtcatttttacatccctcttcatggaaagcccaccccccccattccatactctgcacttccctctcatcaggaagcaacttctcctctcccagaagtgaggagcccctcacttgcagtatacaagtccggtgacccatgaatctcagcgacccatccctcccctccctctttccaaactgaggctcattgcacatttgttcagaccccgctagcagccttcgaaaatgagtggcccattatgaaaatgtattgctcacccttcaagcccagctgcactgcagccttctgttctgtgacagaactctgagcgcccctccccacgtgccataacaacctacagatctcacaaagcacccagccaccaccaccacaataataatgatgatggtgatggtgatgataataataacatccctggcagctttgggacatctaattggtctctgaagtatttggtattttgtgtgaggatgccagatgaaacctgaaaaagacgtgttcattccaaggttgttgcggtattacagatttatcatgggaaagctcggtgagtgccccatttagctccgtctacttgttagtccttaagagtatccatctgaacttctgcttgcggccagatagctgagtaatttgattaatcatctgcattcacacgattgactgttaggggatcggttgttggaggatagccaactgactagaacaattctgggaccttggtttttatttttacagggagtataagaccagataattatctggcatattctagagaaatcgacaatggtgtgttctagctaactacttagtaattatcatcagagctaacacgtatttctgagcttgggtctccttgtaaaagccatatgcttggctctcaggaaatgaacaataactagttagttattcggtcactatagcttgcagacaattcaaatctggatggctaaattattttacgattgggtcattatggaattactgcgaaagagccagcagcctgcacagttgctcgtgttgaaaacttcaagcggcattgaaaggccaatagtgaaggatttgattgacagtagcctccatccttcagcccagctgtggggtttcctgagcctcagtttctacatctgtgggatgagtgggctgaagcaggtgtgtgtcccaactctgacaaaacgctttggatctctgggaatgagctgtccgcgacactgctgggaacagcttggagcagcagcagctttctgagagtactctgtctggacctcatctatccactgagggagcaaggcctctcagatgtagattcctggaggctgctgtgttcagttcctatcaagttaccctaactctgtggcatcaggcagcacaccctgggtctcttacagttatgaagggccttgagactcactagactgatgtaaaagtgtggtcggaaatgaggtgtggtagggtagaggtgtggtctgaggtgaaggtgtggtctaggatgaaggcgtggtctgaggtggaggtgtggtctgtaagaggggacacagcttactgccttttccaccatgacttctggcttcttcttccatttcaaggccagtagccttgtttctatggttatatcaactgctttggtcagaccatctttggcttcccatgtgatgggacagttctgtttagggcccacccagatcatctggaaccatctgtaagttgccccattgacatccaaggtggtgattagtcagcatctccaggaactagggcctagatcactctgggggtcgttcttacaaaaagtagcattgagcttagattgactgaagagaaggcggtcatcagaaagacagagggggcgtccagcaggtggaaaggccctgatgctggaagaccagtggggagcaatggaggagggagaagggactaggaaaagggacacaaggtgctgggtcactgcagagccacaaaggttctgcacaggagtgtggagttgagcaaccatagtatggctttacagtggctgcgtttgctgttctgggatttcctacagaccaggccagtggctcttcttgccctcagctggttgattcagtgtgttcaaatccctgttgcagagcagtggtggtcagagaggagcggctagggtaccatcttggatgaacttgatatttttctgcctatgtgggcgcccaggagaaatggcccatgcttcctttgcatttaggtcaacaggacacgttgtccgggatggtggtaagaggggacaaggtataggggtgtgtgaacactgtgtccccttgagaggagttttaaaaacttctcagttggcacatgccatccgtcccctccctggggatccagagtcctgaggagacttctcagtcctgcgaggatgacctgggagcaagaagcagtgaaatcccaggggcttcattcacaacatctaaatccactacgtaccaggagctcatccacagattatttatgtccaactcccaatctcctgtttctcaggctttcaaatccaatcacaccgcactgtcagatccgacaaataggcccacagcctctctcagccgctcctggagacggttcacttggtgcttggatgatattttagcttgcttcccccccaccccccacccctgtaacttgagggcttgtgtcttccgagtttgttcagaccggttttgagtatcctaaatataacatgcaagaattgggaaggggtgcgccgagccatgaagattttctacccacccccaacacacacacacacacacacacacacacacacacacacacacacacagtgcacacacgcacacacacaccattcagtggttttgcgttcctttcgtgtttagaaaagccggattgctttccttttatgaatctcagctgaaaggatttgtgtgtgtgtgtgtgtgtgtgtgtgtgtgtgtgtgtgtgtgtgagcggctgccgttaattgtatgactgttgtggaggaaagcactataaatgcccatcgtcatcagtgccattagattagcatcctcttgcataagattgcttatgcccagctataaacagtcacgtgaccagcggaggcccctgcctggctgaggatcatctcctctttctggtcactgcgctctcacgtctccaagacgctggattcatatgtgtggcatctgtcatcacttcagagatatttttgtcttactgcccaggagataactcagcggttgttaaaaatacaaaccagataaagaataattctgcccataacccccggacagccagagagagccccgtgtatgatgtgggggctctttgccaagtaagcctcgaaaccaggaaatgctctgggggggggggaggcgggggaagaaaggctccctaagtagtgtgaatacctgagatggagttgcggaatccacatacagtagtcacacgtacctgcgatcctagcatgggggtgggggtgggggagagaggggaagaccctggggatcccagaccacgcagtctagactaatttgtgagctccaggttagtgtcagacagactgtgtctcaaaggaggtggatggtggacaagatggccacctgaagttgagttctgacacatgtgccaaacataaaacaaaagcaaaaaataaaaaacaaaaacaaaaaaacaacccacccaaacaaaaaaaaaatagataaagatgatccaggtggttttgttttgtttgtagagagatgattcctacccttccacacactagagtcagaagtgccctcagctaaaagagaaaaaacataatggttcatattgggggtttgccatgagcctacaagcaattcatgttcctccgtgcatacagcattggctcacaccaaagcccttgggtatatccaatagtgagagaggctcaaaaatagcagtgttcttcccaggaaaaaatggaatagatctaatgaatagccagaaggcgttggggtgagccttggaaggttagccccgtccctggttcctgtttggctctttctgcttgcttgactgtcaccacatggccagccctctagtcccaacatgaacgctaccacctctcttcctttttagaaagttctgttgacaagtgccctagttgacatttgcgatttctaccaaacactgcactcacgactcaacagttttctttgatctatttcagagttcttccttcccttcttacttgttgcggttagagtttgactgctgtgaactgacaccatgaccaaggcaactcttagaaggacaacatgtaattggggctggctcacaggttcagaggttcagtccattatcatcaaggtggaagagcatggaagcatccagacaggcatggtgcaggagaagctgagagttctacatcttcatctgaaggctgctagtgaaagactgacttccaggtagctaggatgagggtcttaagccatgccaacagtgacacacctaatccaacagagtcacacctactccaacaaggccacagctactccaacaaggccatgcccactccaacaaggccacacctactccaacaaagccacacctcctaatactgcccctccttggctcaagcacatacaaaccatcacattaagggtaagaattagacatctctgagtcaataagatgactcagtgggtaaaggtgcctgccacaaagcttgacagattgagttccatcctcataacccacatggtagaaaaactgactcctgcaagctgtcctctctctgacacacacacacacacacacacacacacacacacacacaggtctccccccacctctgcaggaggctgaggatacaggatgactataagttctaagactggcctcagagcaaggtcaaggccaacctagataacttagtgaagctttgtctcaaaaatacaaaatagaaaaagaaaagaaagacctggagctaggaatgtaacatccacaaggttcaattcccagtatcatgagaaagaaagaagggaagagagagagagagagagagagagggagagggagagagagagagagagagaaaggaaggaagaagagagggagggaaagaaggaaggaagagagggaagaaggaagggagggagagaaggagagaaaggaaggaagggagaaaggaagggaagacaaaaagagaagaaagaaaaagaaagaaagaaagagagagagagagagagagagagagagaaagaaagacagacagacacaagatattccatgcaaaaagacaatagcagtttcttctgctaagggtttgctgtagctttggatgggttatttttgtttctttattaaaaatatgagggaaagttctatgagggaaatatgaggaaagttctattttggttcttcctttcagatggtttttcagtctaacacagagggtaagctatgctttatgcaacagggtcaggtgcctttgctgcaagactggtccctcaacagtggcagccaggaagcagagaaaggttacaggatgtgtggaggggccaacctttaaaagtcccgaaactggtggcttgtttcctccagccaggcccagctctcaaagatcctgtaactttcaaaatgggtactacaaaccaggaagtgagcaggccttcaaaccatatagatgtgtgaggacaattcagcttcaaaccacatccatgtgttccttgatgttgttatggtatgaatggccatagggataatagcaactgggaggagtcaggtttctttcttggtaccacaaacatgaagctcggcgtggtgcttattgaatgacacacggtgatgctgagatgggaggactcagcttcctgtctgacctctgctcctggctggtcccttggctgggtggcttctctcccctcagtgccagggcatccaaagggaaggtgtggaatgataagttgtgtccactggtctccagctgagcagagagcttggagctagaaataaccgtgcgtgagtcatctgggtggacgtggtgatggaagctgtgggcctcagtagctgaggtcatccagggaggcgagaagggtcacctgaggacaaaggctggggcacctgtccctctgagtggtccgatggagagggctcatcctgtagagggaacaggatgcatagccgggatagcaacctaaagtcacaggcacagtgagcaccccatgttgtttcctgctttgttcttattgggcaggatgtgggccacccgtctccatgatcatagttatcttgtttcttggttggtttgcttaccttttgacttttatcccctgcatccccttcccaccactagaacacagtcctaagagggccagggcttcagctgtttggctcacctctgtatcttaagcccccaatcaagccattttcatgtacttgtcagattaatgattaacaattatatatctatatatgtatatgtgcaggtatatatgtaaatgtatatatgcatacgtatgtatatgtttgtgtacatgtgtatatgtatatgtgtatatgtatatatgtgtatgtgcatatgtgtatacatatatgggtacatgtgtttgtgtatatgtgtaaatgtatatattatgtatatatgtatgtgtccatgtgtatatgtatatatgtatatgtgtatgtgtatatgtatacatgtgtatatgtatatatgtatatgtatatgtgtatgtgtatatgtatacatgtgtatatgtatatatgtgtatatgtatatatgcatatatgtatgtatatgtgtacatgtgtatatgcatatatgtatgtgtaaatgtatatatgcatatatatgtatattgtgtatgtatacatgtgtatgtgtatatgtatatatgtatgtgtatatgtgtatatgtatatatgtacatgtatattatgtccatatgtatttatgtatatatgtatattcctagtctgtgtagcctgtgcctctcggcaagtgtagcaggaatggaattctttgatttgggtttctaaggaatggcaatgtatagaattagagtctgggcttgggggttgggctaagggatggaggaaacataatgagatgctaatagtgtgatagtaatgcagaacagtgactcgaggacacttgccccaaacatccatcatacacagatctatgtgcttgaagctgggacttctgagaagatgatccgtgctctcgtgggctcataggtgccattcactgacagagacccctgcatcattatgatctatgccatgacccagagctagcccgtgattcaaccaagtaactgccaaatgggtaagataggggtgtcactgggatgtcagagtacctgagtttgatccccagcacccacatgaaagccaggggtggtgacacatgtctgtgaccccagtgctgctgaggctgagacaggaggaatctagccagtctagagatccttgctcagtctggtcactcggtgacctccaggttcagcaagagaccctgcctcaaaaaaacaggataaagagcaggtgagaaaagacatctgaaatatggcccctgtacagacacacacacacacacacacacacacacacacacgttatccctaatagaaaggctagtatgtcaaaggcccagagactccaggaggcctggcctggggtggatagtgacctgggaggagctgaagaaaccggtgacccatttttaaagaacctagcaatggaggctgaggagtttgagtctctgtaaagatgaaaaggaagctatctgagaataggacccgagaggtggcacggtctagttgagttattagagaacccactggggcatccctcacatcagaagccctccaggtagaatggttgatgtgttccactcccacccatggtgtggaccgtcgctgctggtcctaatcagaaatgagcaggcatgcttacaggttccagcatcctagcttctaaaacctagttggcctgcctctgtttcgggagagtggcagcgagctggcatctttggaaccacaagtgttctcaaccgctttcactacttcccagagttaaaaatagcctaatgccatgcctacgttttgaaggcaagcgtgggcaccctcaggcccttcatgcatgttccagagagttccaggacactttcctctgtgttgctgacaggcagtggttaaacaatgataggggagttcgctctagggagggctttgcggagatgaaaagttggaatgaacaccctccagggcctcccccttcccctgctcatctgtctgtctgtctgtaatggtggtggggatggggtgaatagcatctacttcagaggaccattcaaatgactcaggaggcagagggaaacaacaaccggtatctgtaggaaggttgatcagatggcagggaattggcttttaattatcattttgctcaagggcattgggttgacacaaagctctgatcccagtgtgttttcagctcgtgggctccgggatttggcttgatgtcttcccagccgcccggtccctgctccatttttgctttggccccatctgattgtgtttaagataattaagctcatctatcaaataataaatagatattgaccgattgtcatggtgagtatgaggatggattgaacactgtgactctgctcctctggatcaatgggagcccatggggctagataaatcctgatcatgactgacaagaggaaaatcgatagtcgtattaatatatgcacccagaccatcgatcttccagttaaaagtgggactgggttagataggggagccagagatgggaagggaaacaggcagacagaccaactggctgatgatctcagatatgaagtagccgctctgtgcttatgagtgtgcttagaaaggcagggaggggtgttccttttttatatataacatttatttatttatttattatatgtaagtacactgtagctgtcttcagacacaccagaagagggtgtcagatctcattacggatggttgtgagccaccatgtagttgctgggatttgaactcaggacctttggaagagcagtcagtgctcttaaccactgagccatctctccagccccgggaggggtgttctcagtgagaagcaatactcagtatttatgtgcccccttctttgctcagaaatccttcctgcccataggcagtatggttcttgttagtgtttggccctgggattctgtgggaagaggagggagaggagagagctgtgtggattatctgggataccacatgctataggttccaatgaccctcagtgtcaaagaaattgctatataccatttgcctgggaagcagggtcaagagagttggggtggagttgtgtggtccctctgagactgtcaggggaccttagtaagctggcctctaggaaaacctgtgtcaggatattagagcctgagtctcacatatgaatgtgtgtcagaatgccttagggcaagctctcaaccttcataacgctgggaccctttaatacagtccctcatgtggcagtgacctccaaccctagaattattttatcgctacttcataactgtcattttgctgctgttgtgaattgtaatgtaaatatttgcattttctggtagccttaggtgaccccgtgaaagggtcatttgacacccctaaaagcgtcactacctacacaggttgggaaccactaccctgggggaggtttctgaaagctggttgtttcttctgtccatcagaagttctggtccctgtggcaagacctggggatttatttgcatcggtgggtgtgtgtgctggtgggtgtgtgaactggtgggtgtgagcactgcctcggtcccctcagtgctaggacacaggtgtgtacttgtgcgatgattcgtggacagcctgctgaagttggtcttcccctcccattgtcacagggatcaaccatgacatatcaggcttggcagcagacacctttacccacaaagccattgagacagcccttaggggccagtgctttcaacagggtccaagggtcctctcaagtgatggggtgcagcaggtagggaacttcactttgagcagcagtaaccccaggctcagacagaagaggagatcttgaaaggtgttgggtcacgggtctagataaagcagggagagggtcatcctggagcccgaaacaattcagtgtgggcacagagcgttccagggcctggaatgtgaaggacagatgagacacaactgggaaaaaagcccttcaggacactggcaaccttagcatctgggcagcattggtcccttggtgtaacaaattcctgccccatgggacattgcaaagtgtgacagttccacctgtgaccccatgtccatttccaggaagagtcacaggtcacgcaggagtggagctcctcactatcccaatcaggtggacagagagctgtttcagtgtagagagggtgttgtcatagagggcgtgggggcacagctgggtgggcatcctgggaacagttcctgctggcaatagcttcaattcgtcacagtgctgtgaagggacactggacgtgtgacgagtccactcccggaggtgctctctctggggacagcagcattgacttcaggatgaatcttggatgtcccaccatcctttcaaaccaagggaaggggttgatagcctggctcagttccttgagacaggaagcaggacttggcaggagaatagatgtttgagtattccttaaggagactgtcgagtggctactagacacctgaccgggcattgtacagggtttgtggctcatgtcagttgcctcttctagcatccttgggtatagagtccatcttatgggaaattaccaccatagggaagattgaaacacccaatgcactcttagctctctaacttgagcatccacgtgtcccgccttgtgggtcatcagcaaataggtggtgatcccctccagtcaacaccctgtagagaaatgtttgtgcatagttgtttgtaagtttgcccttccttccggcagttattcaggcttctctggcctcagtttccctgtctttataataggagataacagccccaccctcatagattgaagtgaggatgaactggaccctgatctgcaccccagtgctcataactgaccacacaaggcccgttgtggcgcttgctcatcagagcccctgccactaatgggccttggagcccacagagcagcagaaacacacacaagccctcgttccatgctgagtattggatctgccgccaggtgtctcagagtgttctagggctggcaacttactatgtgaccttggctaagtcacatggcctctctgagccttagtgtgtgtctcccccaacaggcaagagaaatctgaaaatgggcaaagctggaaactcttgagagtgatgaggactgtgtaaatatggagcttttgaatatatttgaatcagcatatattgactatatgcaacattgggtattgattacatataacattgggcgtcattatgacattcatatacatgcatgtgcagagttattgtatttacctcaaatcctctttttgcttcctctccctaatgcatccatttttaagtgacttggaacttaggaaacagtgaccacatacccaacccttcttcagctcaaaccttcccatggtccccatttcctcgtgtccccatgcctgcctttgctctgaggacaagtgaggagaagcagggagccttcccctgccctcctgtcagctccccttctttgacgacccacagacaggctcagagctgagaagtcgctcccacttttaatcaaaaggtttgtctctgagttctcttcaaacgaggattcccgtttcttctaggtgttcaaaagcctcagagaaatgccacagaggggtgagatcagaccgcttcaaaagcagaggtgggcccctgagcatctacgcaccgcccccagccgagcctgtccctctgaggcagttattagcgcagcccccagggactcgcagccgcagatcaaggactctccttggacttgtttggagatgtttgtagactattgagggttgtcatctactcttgatcaccaggctctgattcccctccgagcgagccaggctccctttgacactccccagaactgcggggcagagagggttgccattctgtctcgtcagtaaacacagttcgcagactctctgccccccatggccaagccacgtacacacaggaactctgctctcttgtactttcctcccctgccctcagccatgggactggcacatccttgacacccctctgtggaagagaacaaacatggggcaatgtacctggaaggcgggcttccctgtcagaagttgaagccacgcagaagggcatggggaaaggaggagccaggggccaaggtctccccttctttatctattccagctcccggtttccttgttttatggcatgatgtgtcagtgtccactttgtccctagcagagtcacacacctcctggtctgcatggcttgacccaagccgagccattggaagaaaacaattactcaccatctacctgtcctcctacccatcctcccatatccccatcctcatttacccaccccgtctattcattcatccatatactgattccaccatatctcagcctctattcccatctgttcatgtgtgcgttctgttgatccacccacctgtgtgtgtatttatccatccatgtcttctatctactctccatccatacaatagtctatctagttctctttctctggtctatctagccacccatagagtatctctcctcctatttctgtatctgcctaagcatctatccttccatccacctatacattcagtatctatcacctacctgtccatctacataaatgcagacatcattaatctatccatctacctatacacctgtccaaccatatacccatccactcatctactatctatccatccacctgtctatctaccttagagcagacaccattaatctatccatatatccatacatctctctacctgtcaatccaatatctgccaacctctctccactcaataaatcattaatccatccatgtacctagctatccatccatccatccatccatccatccatccatccatccatgtacccatctgccttcccactaatctagttaagccatcaaacagtagccactggggttctttgtcctatcagatacagtacaatgtcacgaaggaaaaactagggtgtttttttctgggccacaatgtaagtagacagcatgcaatgctttaagtcaactcaaggcaagcaccgtagctgaccaggaagagcttgaggttacgagtggcatctagctggtctcactggcttaaagacaacagctgagacgtcaatctacgggaactcatcccagtgcatagctacggatacgcagcctgggtcacattccaggtcggaaaccaaaccgacgccccctgccagagaaagacaggctgttggggcccatattttcttccctttggtttaaacttagtaaacattagttctcactgacgagcagggtggggagtccctatgggagacaccaaggagaggccttgtgttatattaatacctggagtcagtagacaagaagagacagcggtggtaggggacgaaggagctaagttcgtagggctgaggttgctcagtgctgcttctaagggtggtggagagctagtgggggatggggggtggggatgcaagaatggaagcaaggcttctatattgctgacttctcggcccatttactcccgactcataataatccctcaacagtaccttgcggtttactcactcgttatttacagagagtatgtttgctaagcaaatcagtagttcagacaagatcgcagcagggaggagcttgaacccactcaagagacctagctgtaattggggggacagtctcagcaaagttggctgtctgagggcagccagaaagactaagaacagatggatagccagccctcaggcccctgacatctgtgttgggactccaaatggcccctttaagaaacacacttcagcctatcactactgctttttgtctaaacttgacccgcttgtcaacctgagtctatattgactgtcttccatcacagtaaaaacctttggttaacctgtcgagagtatctttagtggtaaagtgtaaaagacaggccccttgaagtccttctctaacgggagatggatagctgtggaattttggcctgtgatcaagaactctagttcctttgaggaagatctcttggacttggaagcttgcctccctcctggtgttggccatttgtcctagtttcaaacaccccatcaaaaaaattattataggggagggagcggttgatttggtttcaattccaggccacagtccatcatttcagggaaatcaaggcagggactcaatcagctgtcacatcatgttcacagtcaagagtggagagaataaaaatactcctgcttgctctcagcccactttctctacctttatacagttttaggacctctgagtagggaatggtgccgctcgtggtggaatgggtcttccagaatcaattaacagccaatacaatcctccacaggctaatctctccctggtttttactatgacataagacagtcagcatagactcagatggatgagccaagggacagtactttcccatgcagcagacgtggcttgtgggaatccgttctcgcagaaggctgggagcagaaagagaaaggctggctggcatttctagaacccatgctcagttttgtggagatcccttgggtgtcacattcggcattcctgaagaggtggcaaggctctcgttcttgcttgaatgtgctcaggtcactttgtgaaacactcaagaagacaaggctagagctttgatttcagcaagggaaccagggaagggggaaggaggggacctaggtgaccccacactgccctaccaggcacaaacgacagatcattatccttccattcccctcttctcaaggaacctgggatttgtctgggcatgctcaacaagacacagccttcctcagagcctcagcatcctcccagtcaagtagggacaataagactccatccatggaggatggaaaagaaagatgtctgtagctgacctagaaccatgtgtgtaaggtgagatcagtgggaactgtggttcttagagccttgggggggagggggttccctgaagactttccttcagccaatcccagccttctctgttaacctgtgtgaccttggacaagttaccaagtgacttgagcttcatcagggcacagagagggtaagcttagctgtgtgtccttggataagttaccgagtgacttaccctatctgtgccctgaggctgctcatctatcaaataaggagtacacagtacccacctcactgagctgtctttcatgattaattaagtgcactggggaaacatcaggcatagctaaagattagaggctattgttgttaacatcattgggagattccttcttcattaatctcttgagaatagcttaatgcatgtttgctcaaaggatggatggatggatggatggatggatggatggatggatggataaatagatggatatgtggactgatatatggatggatggattgatggatacattaattagttgattgattaatattccaatgaagagtattggctgtcagggagctcacacatcttccaaacagtctaaagtttggctactccaaaacatccatctctgtacctctgatgtgacatgtgaactgagccttccctgcctgtctgcccaccagaagccaccgtggccttgctccctctctctgaggaattggtagttccctaacttggtattcttatttcacccagaccagaagtcaggcatccaaagttctctggttttggggtactgccctgggagtggtttcatgtccctctggtcaccatcagtaaagctatttagttcttgacacaactcagagaggtcagagtgataggcagggttaggtccctggggtaagggtgaccgccctgctatggaaaaccctagaaggatgagggtcatgtgacccttttgtgggtcatgaaggttatttctggtatagtatagagagtagacttgaggaagagaaggcaaagtggatgcctagccagagatcattgttgcccagcctctaaaaatgtcattggagatggaggagatggcttggttgatagagtattagccttccatgcatgaagacctgaatttgtttttaagattttattaaacacacacatacacactgtccctatcttcaggcacaccagaagagagcatcagatcccatgacagatggttgtgagccaccatgtgggtgctgggaattgaactctggacctctgggagagcagtcagtgctcttaaccgctgagccatctctccagccctggatttgattttagagcccatgtaaaccttcagtcactgtggagtgcgcatgcctgtaatcccagcatcagtgagatgggaaacagagtcagctgactccctggaagctcccaggccagcgagcctagaaatgacaaaggggaatgcaagtgtgttttgctattgtggttattctcatctatcttacggccaagggatgcaccagctctcaggtgggaccgagccccgccactcaatgctccctctgccttaatgcagaactggatgtgcaagttgtcgatagctttttcagtttgaggtaggacatcaaaaataacataggtgctggaggaatggctcggcaggtaaaggtgcttgccgtgcaggctagaggatccaaattcaattcctaggactcacatcgtagaagcagaggacaattgcaaagttgtcctctgacctctccacacacaaactgcagcgcacacttccaatagtaataagtacactttaaaagtggacacaaattcctttttattcttcagaatgtcacagatagaagattcactttttttttttttatgtttttttgagacagggtttctctgtgtagccctggccatcctggaactcattctgtagaccaggctggccttgaactcagaaatctgcctgcctctgcctctcgagtgctgcgcaaggataacacacaaattcatgaagaagattcattcttatcatatattttatcaataatctctccctttcacttaaaggaagtacaatgtgccttctctaacgttcctacattcaccacccccacactttgggaccttggtaaaaaaaagaaaagggtcacagggtcaccaccccccaggtactgtgagcactgatctggtcaccaggtagctcctaggtgagcagtgggcgggtagcatctgtagcatggacccattgatcacaggagtgattcatatcccgagcagaatagggtcacgggagagtgatgtaatgtgagatttcatcatgttcccataatggcctgcagctgaaaatatgtgaattgtttatttctggaagtttccactcctcactttataccgtggttcaagctcaagtagctgaaaccgtccgaaagcaaaactgtggggaggagggtgtggggaggagggtgtgggaaggagggtatggggagcactgcctccttgttctaacagtcttccttctctgagccaagcagttgacagtcctgatgtgttgtctgatttaattgaaccctgcttaatgggtgaaacagaggctcccacacataaagcagcatccagtggtggacttggtggtcacctggttactcctctgagcatagtattccacagagccctatcatcacaggctcagaagggttaaatgacatgcctggaccacccgctatataagggactgagcccacatcactctgtggcctctccccctgggcctcccttgcagacaaaaaactggtatctactttcctctttggaagactcactccccaatatacactcccccatcctcccaggggtgcttatggccagggtgcaactaagctcgtaggcctatgaacaaagtttctacgagtgaaatgaagagatttcttaatctcggaagcaaacagatcctcacaatgcacacgcagcaggtcagctccagcctgaagctggcaatccgggagagaaaacatatcagtgtttgctaagtgggaggagagacgatattggctcgggagaaaaaaaaatgtcatttttcagtcagctgacaagaatgttaactaacatataacctagaaaaccaataaaaaatgccagtctgattcttccaggctgcctacatgaaataattcatgaaattgcatccaggagccctgacatttgcctcctggttttgatagagcagatattttccaaggcctgatattggcagcaggtatattgactttgcagattccttccctgtggtgtcaggtgatcagaaattgtgtccccaatcagaatgttcagaaatggcattgttaaccacaccatgtgtctgtctgcttatctacccattcatcttctcactcagggaagggagctgtttctgggaacacagtgcctcccttccaagacaagcctatccctagaaatctctcaatcagggcaaaggatgaaacatccagaaaatggcatgccacatggggtcaagatgcacaaagcacgaacagaaaatgaggtgacataacattagggtgtgagtgtgaaatgtccccttaataggctcaacgggttggaacacttggtctcccactggagggcagaaactttgatgacatggggctgcttagccatgcggtgaccagcagaggtgggcctcaaggctcagagcctgaccctgcttcctgcttcctgtctatgggttgacagggatgcggccagttggctcctgtgcttgctaccaccccagtgaggcactcccaccaaagttgcctcccccaccatgacgaaccacctccccacaactgtgagccataataaagccctccgccactaacctgcttctctggggggtttggtcacagtgaaatgaattaactaatgctggtagaatggccatggaaggaggccctttgacagaaagggacagttttatcagttcttcttctcttgctgtggtggaacaccacaactgaagcagttcatctgggctgatggtatctatgacccgtgagcaggaagcagagtgaatgcaacaacgctggtctataaactcgcacgggccaccttccatgatgtttgcactccagcaaagcctaacagtgccaccaatggagggccaagtgtggagactgggggaggggggcatctcagtcacaccaccacagcaaccgaggaaggagagacaggagatctggtgttgaggaaagattcgtatctccacggtcaaccagccatgggtggtaaaatagtcgggggggggggaggggagatgagttctagaaggttccaaagacaaatattgaaatcaactgcacactcaatagtgcattgggtccatttgagttgagtggtcatgacacacgttctgggccccatctcactcctcccaagtcttccatcggatactgctttctgtctcactctgtgaagctacatctgccatgtctgtgtctgaactaaacacatatgggggctttctttatttttgttttccttctccctaaatgctatgctatgctgtaagagctgcttataggatgttcacattacagatggccagcagctccgtgtactagagatgctgttatgtaaaccatctaacggtgatttcaaaggacagtggaccatgtacatatactatatactatatactatatactatatactatatactatatactatatactatatactatatactatatactatatactatatactatatactatatactggtgctgtgctgtttttgcataagagagcatctgcagagcttggcatctgtggggtgagatctcgagagcggagggacagccatggttcacttaggactaaacttaggtgccaactggagaggtgcatcacaaaacaccacgaagtcctgggtgacttcgtaagagtggagagtggtggggaccagggagatggctcagtcgataaggtgtttgctactcaagcatgaggacctaagtttggatccccagcatttacccaagagccaagcatagcaacccatgcctaggatcccagaggcaggaggatccctgtagcttgttggccagccattctagctagaagtgtggagctcctggcatagtgggagatacctctgctttccacacacgcatgctcctatgtgcgcgcacacacccacaaagaagaaagaggagtcacatctcgctacattgtacaatgctttgccatagaatgctcacagctgtcctgacgtgtgactatgaacgctgactgtattttacacaccaggctccaaactgccccagaattccttcccagagcagaaatccacttcagcagctggcagtgatttcacagagtccaaggtcatggaagcatggcacctgggctgtggactgggggttgcggggggaggagggagacacccatcactcaagagtcagactctgtactttgattttctccacggagctaaccacacccacccacctgactgtaaccctcagggtatggtaacctccatgacactgggtgggacaatctgggaccttaggattggggtctattcctgagtgatgtagaatgagcatcctcactggctccggatcttcttctacatcctctggcccaggccagatttccttccactactaaccatcactcagcagccaaattcacatgtaacacggataacagaagtctgtgcattgcttgggatccctgtatcctcaacacctcctagatagactctagagtatctgtgggacttgccagaatctggggtgggggtagggtagaggtggggtggggggaagggtacccaggcaaacatcagataagaattctctaatcgccctggagttgagagcttaaaaggggccgtgggaggcacgtgaacctgccttgtgatttcaagtctctgggaaattggcaaaagcttacattttgttcctgcacctgctaaattggcttttggggggactgacaggactttcgatggaaacagattaacaaggtgaagctcggtggctaatggaaatatacggaataaggattacaaggagggtttctttttccttttttttcacctagctcgtagggatgcgacagtctcttggggcacagtaccagttgtctctaatctctctggacacttatcttctgttttgaaatgatgaagaggggaggtcacattctcatggtgactagcttgctatctgggacaagctagagaaagctattaacggaaaaaaaaaacatgaaattgaatcttgctaagcagagcttcccattcgtctgtagttccttcagagctgcccccacagcctggttttatgagaatggagatgaccatgggcattgggggtgggggtgggggaataccatgtttcttaaataccaagaaaaatacaatcccatgccaaaggaatttagtttctctagcaatccttggcgagcttgtctggatcacagcatctttgttgagctgactcttgttcattctcttctgggttctcatggcctggattcacttcatattttgaggtccactaatccactatcatggccagtatttattgaaagctttctatgatccaatctctttgcatgtctatcagaatagtaatacatttatttattgattcctgtatctgtgggcactcatctcccatggcgcacgcgcgcgcgcgcgcgtgtgtgtgtgtgtgtgtgtgtgtgtgtgtgtgtgtgtgtgtgtgtgtgtaggtcagttctctctttccacagtgtagcaggtggaggtccctgttgattcaagttgggtcatcaggattaacagcaagtgccttttcctttgacaccttttgtgtctctggccttttcctagcttgtagtcagggtaggatacatgtaagctgcagagacatacaaccatggaacttccacttgacttgttaaatcactcgttaaagtcagcagtcggttgggtgatcctctgaggtgcccctctttccatgtggctgttcaggcatcttgtgtgatgcaattctgtgaccctgcatgtcagcacagagcctcccctagtcagattggcacgcaatgaaggacagactggacatgaagcaatgccctttaaagttccccaacccagaagtgacggggctcacttctgagtgctcttttctgtttccccagcaagtgttcctccggacagactcccctggctcccaagatttctccatttctcttggggttgtgaatttgttttctctcccaggtccagcttggactggtcaccccgggcctcaaggtcctcttgagacagagcatgggtgttctttgatacaaagaacacaaagaatacaaaggaggcagaacaaaggttgcaaagtatgtgggagaccttccctgctctgacagggctgtggcatgtcatagccccccccccaccccacacacacacacacacacacacacactttcccagcacagggagtctcagtgaatgcaaccagccaaaaacaaattcttgatttctctgactttcctttgcttgggcttattaaacaacctaaatattgtttgcataccacagtttgcttatccagcgcatacagcttaccgtagctcagtgacttttcatgcatttataaaacggtactaaaatgcaaattgaaaacattttgaacccttgaggggaaaaaaagcattctgtccatcaacagccactgtaactcccaactcccatcccactgcccggacccttcagcactccacccactgacaaatcctcccccactccaatctccctgctgccaatagcaacttcaactttcagtttgcagaggacttgttttggggttagagtgggggtaatatggacacagagcattctccaaaggtaagaagccagttctgggcttgtgatgaaggtatcccgtgtagctgtccctgcctccagtcataggcacacgcctacacatgtaagggcatgcagggacctctgcatgcatggttgtttgcattggacatgcaagaacatacctagacaagcgtatgaacaatcaactgaacatccctgtggagcagctctcgctctgggcctctgataaggccaagtgcatcatggtagtatggtaggagcacaaagcagaggtagagattgcatcttggctcactgctgtgacaaaacacccaagacagaagcagagtaaagaaggaaggttttgcattttcccctcagctcttcgttttgtcttcccatctcaattagctcaatctaggaatgcccacacaggcataccccagaggcctgtctcctggttggttctagaccctgacaaatattaattataagcctctacctctaacaggtcccccaagaccttgtaataccactaccttggtggccaaggctttatgttttgtggggacacttatcaaaaaccacagcaataaatatgcatgtgtttgtgtagcgtgttcaattcctggacgtgtatatgtttgctcacatgtatgtatctctccatctgtgtatttacatatgtgcacaggaaagggcacagacacgtatgtgcccaaagaaactataacagatgcatacacacccatgccttttcatctagttacgacagtcctgtggtgttacaatgggtcactttgctcttgtggccccaacaaagccaattgtctaaaaggaaaggcttttaaggcaatttaggatttgcctcctataaatggatgcttatccagcttacttagtgcctagggatgccctgagaaggctccacgtaagtgtggtcttgagaactggggatggaggcggggagaagcaggagatgtggacttgagttgggtgtgttcctctatggctaggtgaccatgggcacacagccagtgtccacccaatggaaggctcatcctttgtctagcttttctgcaccagtccctctctggtcctttctccccccccccccccccagagcttagttccatcccaaacacagtattgcctctatactataacacttggtgacactgcctgatgtgctacctgatctgctgtcagactcaatgtcctcaaggccagcatggtgcctggcagggcagagtaggggttttagggagtgtgagcccagcatttacatgaatgtgtgagtggctgagtgaatgaaggggtgagcgaaaggatagaaaacccatttggccttgaccctcccttgctacagagaagagtgtcccatcattgtcctggctaactttgttaactccaaacagtccagagtcatatgaagagaagcctggattgagggattatctagactccattggcttgtgggtatattttggggggattgtttcaattattaatggatgtgggagggactagcacattgtgggcagcaccattccctaggcaagtgagcacaggctgtataaggatgctatcatgcatcctccatggtccctgctgtacttccctagtaagagagttccaggttggagggaaagctaaataggaagccaacaggccagttcctgccccgacttttctcagtggcaccctatgatctggaagtgtgtaatggataagccctttcatctactaaatacctttgcttagagcattttatcacagtcacagaaaccagaacagggctcacattcctcggcctcagagctccatttcttaaggtgtgtgtgttgcaggggatgtcacaggtctttccagagagtgtccagcagcacagagttttgttgtatttattgcatcgacacaaccaccatcactgcatggaagcagccacagacacctgcaaacccagtgtggttgtgaggcagactttgttaaggacaaagatacttgaccctctcctgatttccccacatcacaaaatctccacctcttgcatcattttcaagtattaaagatgtaaacaccactgcatgtgagagatgacactcaggccataatgaacaattcctaatggcatccgtgtctgctctttccgaagtcccctgcaccccactggcctggagcagtgtgagcagagggctagggtgctctggaaaaactgggtccagtctttgttcctcactgtcctgatgcagaaggatactagtaagtcatttgctcctctgacccccacttgcataccacagcatgcaccccacatgcataatacatttaatttttaaaattaaatggatagtaacaggggctggggatgtggctcaatgttagaacacttgcctagtggcataggactctgggctcagcctgaaatcatgcaggcatatacacatatacacacataaacacatgatacacataccacacacatatatacacatgtaaatataagcacacaccacacacacatacatatacacacgcatataccacacacagacacagagacataaaatatatatatatgttttacatatatatatatatatatatatatatatatatacacacacatagacacacacgcatgcatacatacacatcacacatataccacatacacacatacacatatacatatacacaccccacacagacacacagacatatacacacatagacacacatgcatacatacatgcataacacacacacacaatacatacatacacacatatactttcatacacacagctatgcctgtcatttttcatgatggactgaacttttccagggaagacgcattgctcgactttctgggatgcactgtttgccatgtgcatagaatttgcaaaaccaggtcagcagataagaacagcaaacaagtctgagctgctcggagcaggagctcggctcaggctgcgctttgtgcttcgacttcgtttctctgcagttcagttattttccaaactttccgaatagcaaacacacacgtctggtttcacttccatctgactcagaattcttcctccctcctctttcctccccctcctcctccatcccacctcctttcccccctttttctcaatttacaaaagtaacatgagtttattggagagaaattagaaaggagagataagcagacagaaaatgtgtaaagccctaggtccagcacgcagagataaaccctgccaataccctgtgatccgtcctctttgtgagttttcaatgcatataaattaggtgagcgatgtatacattttttaaaacagcagttcagtttactgttcagatgaaaaagaagcgtgactcgggtcagcaacaagtgctcacagggtttcaatatccaaccctggaaatccacaagttcaatgtctgtttggtcatctgtcatctcgtacctgatttggggggtgagggcggggacacgggaagcacctctacacgttcagctaatggtgtagatcccatgttaagagggaacgtgtaaaacctacctggtgttatatccttctctccccagtcccggaggcggggggaggtgggcacaggaccttattgcttgggagacagatgatagagtcaggactggaaggtgatatccacttctggttctggccagaagagtctgcttcttgctctgctctaccacatgccctcaccgaccctcccccctgtggggcagctcccacctcctccgccatgctgggctcctccctcccattgttgctcttttgacaccatggctgggccagcatctaggacaggaaggccatctcccctgagctcagtagaagaacggggttcccaaagtatccctctttaaatcaggagtctgcttatttgtgaaatcatctttcctgggggcctcctagaaagtcctagaaagatgtgaagattcaaggcagagacccaaatggggagcctatggcctcccatgctggcgaggggagaccctggattcttgtacacaatgtgtcagttcgtaagtaacattcttgccccggtcaaggtgacaccaggaactctcagttctgtggcttgtcaaagaagcttcgaataatgaagatggcctccttatctcaatctccaaactgccaatggagagggtgtccacactgagcaggcacatcatgggaaaggataggagaagtgcatcttgtccccagtcgacaactggcctgtgaccgcacctctgctgaactacatggaaactgaccatggtgtgtgtgtgtgtgtgtgtgtgtgtgtgtgtgtgtgtgcgtgtatgcgtgtgtgttcatgtgtgttcgtgtgtgttccttccccccaacccccagttcacagagcaccacagcttccagagatttctggtaatttgccctgaaaacttggagaagtttcaccatggctcttttttctgaagtgcatgctctgaactaggtgggcttactgcctcagtttccccatctgtcctgtgggaatagtcatagcacctcagagaacaaggaaaaccaaatcttaaagagaaagcaagagcgagagaggaagagagccagagagagggggaagggggaggggagggggagagagaatgcaaaataaaataatttaaagatgaaatgggtcattctggggaacaccaccagagattatcctcaggcctctacacacatatccacacatgtgcacgcacttccacacatgtaagaagcaggattagatgagacaattcagctactgaaagtcacctagaagcctctgcaatgtcccccacaccctagataacccccaaagatgactgccccatcaggatgctactgatcttgacaaggaacacttggttagaagtggtcccaagtcagcccagagcccctgccctggagtgacgctctctaggagccaaccctgactatcttgtcaatggacacccccatgcttattcctctgtttctctccatatagtctgctgtaatctattcccccactgctggtctcctccatgggactatccactccgagcaagggatctccttcctgtctgtcacctgcacacactgtctatgcattgaagggaaagtctccctcttgatctaagcctttccaagctgtctctggcagaacttgatttgtttcatagaaagcagagccttccagtttagagccttttgtgggtcacaatatcgaactaggatttggctttgttttgttttgttttgtttttaacattgtttcctgatgtgtttctctttgtgtctattaaggagtctgggatgggggagggcgcctggcactccctgtggcaataaaagtaggctatgattgaagcttctttttgtaatactgctgtcctccgtttcttgttgctgtaatgaaatgcttcagcctgggaaggttatagagattaaaggatcattcagctcaggactcttgatgatgggtagcctaaatgcgtggctcctgtacctggtgagggcagccacaacaaacagcaggtgtatcatctccaatctcttcctccattgtagcctatcaacgccatcacaggggcccacgtaatggcctcacttagacctaattcctttcctaaggcctcatctccatgaccattcacagttaggttgaggggttaggtttagaacaagtcagtttgaggggacactttgaaaccatagcagatagctggagtgttcaacccccgtctgttatgcacaggggatgaatgacgtcgctgatctagcaagcggtctggagtggccatgatgggcagaatcctggatgatactgcaggccgagctcagagatgctgagcatgtaaggatcagggctcaggaaagagcacatcccaagatgcctttaaacggtgttctgcactgggcttcttggtgtgaggaaatgctactgtggcctgcagatctgcagtgagctggaggtcttacctcctggggggggggcttttgatcttgaatgatttctccccatgcaagtaagaccagagagggtgaatgccatcaagtatagtacagtaccaggccatagtgagggtgacaaagagagtgtagcatggccagagccacatatctcagtccttaaagggtcagggcagcccacttctggccatttaacaaatatctcagatccagtggcagtaggaagagagacaaaagaaagaccacagagaatatgtgtctccctcttccttcctgctctctctgagctctgcagccatgtttgtcaggaggaggaaagacaggtgtgagttgtcaaaagccaagccccagggctggggaaatagcttttgagaaagtacttgctattcaagtctaaggaccccaaatccagctctgtaaaactccccgtttgcatgctgtggaggcagagacaggtggatccctgcagctcattggctagccaggtcaaccaaatgagtgactgaccctgcctcaaaacataaggtagagggcaattgagaatgataactgctgtcactctctggctccacatgccacctcacagcaccttgcccctacacgcaaagccaagaccttctcccctggggtctagcctcagctcattccgacaacatttttttcttgcccagcttggatgtgagccccaggcaaacccttccttaatggaactcgataattcttcatttcccaggaacatgctgggttacgcaggtgacaaattgctggcccttcccatttttataagcagctaacctggcactttttttttattattcttataaactcgccaaagtcctgaggtttaatatcatcagtgttagattcatggaggacttggaagctggagattgcctgaagccagaatttggtagagtgttcagcctgtcacttggaatatgatttattggcttcagggacagagaaagaacatggggcaaggcagtgggatttttgagtgttgcaaagttggggatgagatgctatgtcatttgtagcagacatttgtaaatcaccctgacaactggagagctttagaaataacaactgatttgtaaaaaccaactgccttgagtactcaaggaattcgaaggctgggacagttcccaccaaacactgggacaagctctttggagcctggccttgactgggttactcaaacaccccatacagcatcctacctcagggcctttgcactggctgggccagcagctggaactcccccccccccccagatttttttcatgtttggcttcttcattaagctaaccctaacccttcccacaagtacctcctgacctatatatattgtgtatcccaaatggtgatcattttatcaatggttctaagagtcaccattcatgcaccagatagagactgcgcctgcatggtctcagtttgttgtcaccaatccatgctaattgcccactggattagtgtcacatagctactgtgacaggtaggcagaaacagagagtttaaaggaataataaaaaaaaatccgttttggaagtcagatgtgcagatgggactctctgagttaaaatcccagtgcaggcagggattctcccagggactcctgggagggatcttcttcctgtttctctggcagttgccttccagaatcttccaagccagtacttatggtctagatccatgatgcattgctctggcctcatcctctctcagagctgcctctggctcttcattctctttccattggagctacaagatggtgcagaattgtcccatcaccttaccttaaattggtcacatctgcagcatccttatatgccatggatggcacttagtgggacactgtggtttggggatctctgtgtcagctcttagaagtggctgacctccgaaaacaccagcattgtcctcaaaccctcccccccccccccattgtccacatccgctatgggtccattgggcttgctggtaagcagataggcatacagagagggtgaatccctttcatggttacagtctgggtcaagggtggccactttaaaccaagacccttaaaggttgaccctgctggatgagctggtcccattcctgacaagcctatggcagacaagcttacaacacagattttccagcccagggccatctttgctaacaattcattgcacttcttagatcaaaaaaaaaaaaaaaaaaaaaaaaagttcaaggtagccttggggccactgccagaagccaggctgggagaggtaggtggcttgcagagaaggcaaaaccctagcagtctttgtgcctcttttaggagaaatgatttagttacccaagagggatatgtggatatacatgtgtgcatgtatatgtaccaagaggtggcatggatacacacatgcatgtgtgtgcatatatatatatatatacacatactgtctcagaaactaaaggaggactggttaaagccctgagccactgaagcaccttctcctgacctccagactaaccgctcccaagcacgcagactccattcatcttcattgtcctagcggatggtggcagagatgtcatagctgtacttactgaagatctatgtgccccagggtctcagaagaagatgctgtgaagcaagcagtaggctcctgagcacaagtgccatgcaagggccctggttcccattgccagctctggatgaaggagagacatctgcacagccatggtcttagcagcactgggcacactggccaatatgtgtgctggttagctttaactgtctcaacttgatgcaacctaaagtcacatgggaaaagtctcagtgagggactgtcagtacaggttagcctgtgaacatgcctatggggagttgtcttgatggttatatgacatgggaaaatctaccctgaatgtgaaccatacccagtctgggacctggactcctctctccactcctgatggtagatatagcataatctgcttcctccttgaccatcctcagtgatgagctatgacctagaattgtaagcaggataaaccctccctcccctgcgttgctttttgtcagggagccacggccacagaaacaaaactagaacaacacagaaccagcctgagtcttctggtgaacgcacagggcattcttcagccatttaaagagagactcttgcattcacaatccaccagtgagcctgcagacactatgcccaaggaaggagacagacatggaagatgaatatgtttttacaggaaaaccttcaaaagtcccactcaaccaagcatggtgattcacatctgtaatcacagcacttgggagactgaggcaggaggatctggagtcccagcctagcctggattacacagagagacactctcaaaatgcacagtctggggtgtaactcagtggtacagcttacctagcatgcataaattggatctctgcactgaggcaaagaaggaaaaaattcacactcttagacaagtgatgtgagctggccagagaccagggatgggtgaggggtctggagagatgctggtctaacaagataaaatttcttagaactaaggtcaaggtatccattgttgtcatggtaactggctgatacatatttatgtgtgtgtgtgtgtgtgagagagagagagagaggggggagggggagatcatcactaagaacagtgtttattattagcccaagattagtatttaaagtactgcatatgctaataatcttgaattagtcactccagaatgtttatattcatcaaaatctattgtatacaataaataaatgcaagtttaaacctgcttattgaaaagaatcatctcagccggaccaggtggccaagggctataatcccagctatttaaggggctgaagcaggaaggttcctcggttatagaaggatttgaggggtagcctgggcaacttaggggtaccctacctccgagaactgggattgtacctcagttgtaggatgcttgcctgacctgcccaaggcccctcctcagtgatgatgacaacaaatcccttttgacacttggcttcctttgtggagtagagctgagatcacactgtggtgacaggagataccctccatgggcacaggcactgtttgtttatgtgctaccaagaaagacagacaacacccatggtatgctgcacggtgacttactgcaaggcacacatgccctgctctctgagatgctaaatatgagtgtgcatcttggagtctttgaaatggcatgaaaatgttgtcccgcctcctggcataggtgctggcttcatataaagccctcagcatgtgtgaaccctatctcacagatgaggatactgtggctcccctcaggtcatgacgtcatgaagctggctgtaaacaactggagagatgtgaggttattttgtatcttttgctctctagcagcatcttctttcagagaaaagctgggagaagttttgtgtgtgtgtgtgtgtgtgtgtgtgtgtgtgtgtgtgtgtgtgtgtgttgacatgtggctgtgtaagtgggtaggtttgtccttcccaccctgcatctcagtatctggtcctgtaaaatgggaagaggacccagacagacctcgcaggattcatggaggtcacactgatcccaagtgtgcagactcacatcttctctcgcccatcctcacatccccactgtcccagaagtgtttgtaagggccccagggtcagcctcattccaggctctgagccagccggttccatagacatttgagctgactgggttttctcccctaggccatcagagagctcaacattggtgggagctctccatcttgttcgttgtttgttttgttttgttttgttttgagacaagggctctcatagccaacaagctcagaagcctgcctgtctctgtctccactatgctgggattacacagtgtaggttctggggatcaaacttgagcccaggtttttacagggcaagcattttacccccttgccatctccccaggtcttctcacatactttttaagttttttttttttttaatcaaatgaagacccacaggcaaaagtgtccatctcatcagggcagaatagggtagctctgttctcagctctcagatacaaacatgcagcttttccttccaaagcagctcttctgatacacagacaggtatatgcagagagacagacagatacaaagacacacagacagacagacacactcagaggcacacataaatacacagagacactggcaccgctcttccggcttccagcacacaggccaagagtggtctcttccaacagtctcaggaaactccttccacacggtgagcttcgccccgctgtctgctgtcatgtgttctattcattttatacagccatatgaccatgtgttgtcgggtggctccttcatcgagtccctagtttctgttgatgaacacagactgtgtcttagcttctgctgctgtaataaagtgtaatggaccaagcagcttataaagaaaagaaactttgtcatctgttggaagggtgacgtctgagacccagaggccagctcgctccagctttggcaaggactcagagtgttgcaggcagccaccttcacactgtgtcctcccatggtgtcaggtcactggttgaattctctggagcaactttcctaaggctccccctcaccatctctgtaggttcacacccctcccggccatcacactgggagtcaaagatatcggcgcaggaactgaagtctacagttatttaaggctcttacagattacttccaggctgggacaatggctaccctgtaggttcttctttcttccatccatttaaacccctaacactagataagagagatagaggggaaagggggtgccattatcattacttcctgctgattcggagcatcgagttccttggggcaagtttgatttttgccatcaggatatctaatttttttgtttgtttgtttcttctttgtgcatgactatttaacaaacgacaacaaaccgccaccaaccagttgggaccctagcatttatataacatctgaaaagtccccaggattccaaatgtcacacaattgtaggaactatctggagctggcaaaatcacgctccttctagaacaagaggcatatcagtcagctgctatggacagtctgaagcagccccatatcccacacatgggatgaaaagaaaaacatatttccgtaatatttctgtgtgtttgtttgtttgttttttaaagaaacggagattctcatgacatgaaagctattagaatttttattatgttgtagtttgtatctgagggtaaatgtgggtgtacctgtctgctaggcatgtttccaggggaggaactgttggccatgggctatctgcatatttggcattcatagatgagtcaaatcatggctgtaccagtgtccactctgacgagcatccccagataacttagcatagtgagacaggaagcagccactgtcagtggtggccgagaaggggacttcacgcggtcatcctgaaccatagattctgggagtcttggagcctggtgcaattattctctcatctgtgtgcaggagggagggctctataatgagtgtaggtggccgctcgagaacgaggtatccaggggagggaatccacccacggtcggtcttccatctctgatacttaaatgtcaacagagccaaattggctgctcagccagcccttcctccacctctgctgctaaggctcagcaaacttgccgctgtgcccgccaagaggggacacagccttgagtcatctcagaccacttcctgctcatgcactgggtgaccttgaacaggtgattcagccagcctgtgagtcagctgctcttggaacctcaccctgggggcaggtgaagagacaagtcctcgaccaagatcatggatatggagtggatgggtggatggatggacagacaagacagatggacagggtagagagacagggcagaagggatacacaggtaaacatgtcatttctccttttgcacctgtgtgatcactattttatcgatcataaagaccttgaggacctactgtgtgttgtgcagggaacagtgcctacattttgacacacctactcctggtggtgcaggaagtcagtctctctctctctctctctctctttctctctctctctctctctctctctctctctctctctcacacacacacacacacacacacacacacacacacacacacaactttatgatgcaaaagccaacttatttgtcaggagtacccagggttatgcagcactcatgtgacagatcagaagcctaatcccatagagtctgaattttgtcccctaaccagtgagctggactttccatcagatggcagacagcaggcaggactctatctcatccagtccttctagtaatctacaaagcaggtttgttctgacagataaggaagctacagcccagaggcactggctaacccatgccaaggctttacagaaagcaagatccaggactggggtttgaactgggattctctctgatagctaacactctcacttctacctgaataacacaaataatcccaggcaggtccagtgtgcagcaaaggctgaactgacaccaacggagcccagagcactttagcaataaagctgtaaatgaaaagaaatgcattcaagctgttaaccttatagagatggaaaattaattatcataataatggcttccacacttctatccaatgctggcttctggaggctctactggagacagaattcactcttgtgtttatttattcactcatccctttggtggctccctgcagcacctggtctgtgtatgtcaggagtcaggctcactgggaaggatgagaaggagaagcagacaagatgcagagtgaaaaggtgttgctaccacacaatgtcctttcccagcctgtcattcattctaaactaccagtccctgaaacaaactcaatgaggctctagacgggcttgtataccctccgtctagacgggtgtccaattgagcgccattatccctacagacacgcccttccccaccccatgaaaggactgtgccatttgccaatgacactcagcacacagcagccacagctttgctgcttctgtccctacattgggactcccagctgggacacatggcagacagtgcaatctgagtggtgtgagggacctaaagttattggtgtatgacagctttcccttgagatgggaaacacacaggcctgtaatcccagcagctgagaggctgaagcaggaggaccatgagtttgaggccaacccgagctgtatagtgacagtctgtctccaaaagggctaagggggaactggagactgttcggttcagtgcaggccttataagcctgtagggctgattttaatctcttggaacctgtataaagaaatatgcatactctcagcgctagcaaaaaatggatggattccctgggactcaacaaccagccatccaagcctacatgctgagcctgaacttacttagatcctatctcaaaaacaaaacaaaaccccacagtggctggcacctgagaaatgacagcaaaagttgttatctggcctccatatgcatgtgcacacaagtacatgtgcacctgtatacacacgtgtgcctgcctgtacacacgtgaacatgcatgcactgcacgtatacacatacacatactcatactcacacacacgttcacacacacacacacacacacacacacacacacacacacagagcagggtaggtaagcctactgtcttctcttaatcactgtctattcttgtaaagagacaccatgaccaaagcaaacacatgagaggccattcttattcaaaccacaaaccacccggggaacttctggacctggatagattttgcaggcgtctacacggcaggaagcacctggcattcctcaagaatctacatggacatctttgcaggtcatcaccccagaaccagctctggagttcaagtgcaaggccttttactgtcccatgggcatcatggtgacacatcggctcagctcttcgtgacctctgatgactgatgtatgtggaccagctttctcaccactaacggtcatttccccggatgatcttgttctttttaccttgcagcctctgtaagggacggacactctactctgtggtgagggacgccaagattgtcttggatgtcaacaaaaccaggcagatcgcgcaagagattgtaaaggtactgtgagttggatcacatggcccccaatgaaggagctagagaaagtaccaaagaagctaaagggatctgcaaccctataggtggaacaacattatgaactaaccagtatcccggagctcttgactctagctgcatatgcatcaaaagatggcctagtcggccatcactggaaagagaggcccattggacacgcaaactttatatgccccagtacaggggaacgccagggccataaaaggggagtgggtgggtaggggaaagggggtgggtggctatgggggacttttggtatagcattgcaaatgtaaatgagcaaaatacctaataaaaaatggaaaaaaaaaaaaaaaaaaaaaaaaaaaaaaggtactgtgagttgtaggccccctacctggacttagaaagattcagccccctctcaccaacccttcaaggatcctaagatgtgtgtacaaagaatctgtgaaaatacaacctttaggaatactgtcccaaatgtgttttctggctagcatctcataaccatgacacctgggtacagggaaaggccagtgagtataggcgagccccacagctatcttagatagtagatccattccttccaggtcactctgatagaagggaggctcatttttggctcatggtttagatcattgtcataagaatgataggggatagcagtccagttcataatgacactccggtcattaccagacagagatggttcaatgtcacagtagctcagaaggcagaaagtgagacaggaaatggtcacagataacattgcctcagagacctgctccaagtagccctgtttcctccagtaggctccacctccccagaactttataaagcagtcaccagttaggtgaaaacattcgcctgagggggacccttcagagtcagaccgttaccattagcaacagttatacccgagtcctggaattcccatgaacactcagtcatcttgtctctctgaagccagggaagcatcaagttgctgggtgttgctttgggtgaaatcagataagccatcccaaggctcccaacagctgccttcttggtgggttggactcgggttctcagttcccatcagaagtttttggagtgggctgtaagagcacagatatgggaactgctcaccgagaccaaaaacaaaacaaaacaaaacaaaacaaacagtctaaacattttctaattgtttactcttgagctagaccgccaatggttctccctctgtgttccagatgtggggtcacgaaaggtctcttgagtgtctcaggtcattctttgtggctgtgttctgagggacagagggagcaaggcccctttaaaaaggaattgaggggaaatagctcttgggactcctttctctaatgtcctcatcctttctggtgtccctactccccctccccccacccagtccccacccccaggacacttttccttcatttattctacaggaagcagattggctccagagacagctttgcaggggtctgggggtgatggtgggctgtgacccacatgcacttagccctccaagctccatgggtggaccctacatccttgaggttccaagtgggggtagcaaggaagtgccggggttatctctaaggagtctgtgtctccttgtcgcttacagggcatgggctacctccacgccaaggggatccttcataaggacctcaaatcgaagaacgtcttctatgacaacggcaaagtggtcatcacagactttgggctcttcagcatttccggggtgctgcaggctggccggtaagaggtgacaggtgacagaggggttcttgataaatgagcatcacaggatgggagcacaccccaaatgtcctgagtgactcggattgggggttgaacctctcttggttgtggaaagttgtggctaggctcccatgccagtcagagtcgcccaagtcattctcttgatcctgtgagccttgcttgtttgtcctgaaagtagcacttttgagagtgtaccacaaaatccctaaacctcacaaactcttgacctgggctggagggctttcctctttgcctagggaaggggttggctttcctagggtgggttcagccaagccctaagctccgagctgtcttaggaattcattttagtccagcaaccaaagacagcgatggttttaggtgccaggtggggttccaacagttcttcactgtggctgtggccaaggtaagcagtctctgaatttgagtttatttgaaaatgccttcctcctagcatccttgtaaagataaaacaggagaatacaggacaagcatccagcacaggaccctgagtagcatcagacactgggcaaatagctgtcctgctgtgttgtaattagcatgcatttgcatatacctccccaggatcacccagggaatgattaaccatctttaagtaattaactctcagaggccactcaccctggagccagccacattgagtcaaccatgcaagaaacagcttgatcccaaataaacagcctataactcaaaaggtctgccctctcggattttaatttggagtgtgtgctgtgtacacacgcaccgtgcatgcatacatcttaaattcctgcatcatctaatgaatggcctctctccgtggggagacaccgctgtgattttttttctcatggtgtttaactttctgcttttctggagagccacagttctctgagggacatcctcctgtcttcccaaaggactttatccctgctgtgagctacctttgaatttgagccagaatgcttgaaatttaacagaacatgacataagctgtttctgagtggtatactaacatacagcaagcagccttggtttctgcgtttaggtgtcacacacaaatacacacacacacatccaaatggaatgttccaggttctaaaactacggcatgaagatacgtagagggaagcaaacagatcagtagacacaaggagagagtgagtcagtgaaggagcaggtatggctccttcctccctctgtccccacagcagtaccaaggtccctggcttattgagagaatcatacctacttttgtgtgccaggacccaggagtcagagcagggttagggacacaaatggtgacgtcactatgaacccaagtatttacatgggacgaatggaggctggataagtgttttctttaactagatttggaattggtcaaaacattagatccgtccctcctggtgacctgttcctcactgtgaacagaatacctggcccaaacagcttaagggaagtaggatgtatcaaggttcccagattcttggattcagcatggctgcttggtcccatgcagttgggcaggcatttaggaggcagagcccaggtggaagagaaacctctctgcctcatggctgacaggaagtgggaaatgacagacaggaagtagctgaggatgactccctgggaaactcatggcaccccatgactcacttccttcagcgaggttctgcctagttgaacctcccaaaataatgccactgtctggggaccaagcctccaacggtgagcctttggggaccacttcacagttacaatgtaacagtgagcctttagggaccacttcacagttacaatgtattggtgagcctttgggaaccacttcacagttacaatgtaatggtgaacctttggggaccacttcacagttacaatgtaacacctgtctacatctgcctgcctacctcactgaggaaggtgggggtgagagtctctgacgatattcctcttctgctctgttgctgagaccacactgcagagctggggaagaggaagagggaaacttgggcactttttccttccactcctcctagagacctcagtgggggcaccaaccaggaaaggaatccagccaagttaaagacaagaaatcttcttgtcttgtccagacaatggctactccttcacccccgtcccaccctggctgtcagcacgtgtccatctagtgtcaggagaggtagtagattttcagaaacagtgccaatcaggagctagcaggagaccccattgaacatggaacatttggagccctgcccagcagcctggggatggatgctgggagctgagctaagaaaagagtcagaactgtgggcaacaacaatactgtgaaacctaagttcccaagtctgtgtctctgttcagctaagcagcacatggccactgagagctttgtggggcactcatcaactggggttactctagctaggtagcaaggtggggtgctgatgaagtacacgggtaatattttctcctgtttcttcggcttcaagatcaaggccttgctgactatttctgcaggtttatagatggctactgtgtccttgtatcttctctcagatggatggaggggagcttagagaagagaaggagggggcagagaaagagccaaaacgctcatgtctagcttttgcttctgggctgactagttttgtgtcaacttgacacaatctatagtcagcagagaggagggagcctcaattaagattaggctataggcaagcctgtaggacattttcttagtgattgatgcggcgggggggggggggggnnnnnnnnnnnnnnnnnnnnctgcgtgcttgggagcggggggcagcccattgtgggtggggccatcactgggctggtggtcctgggttctataagaaagcaggctgagcaagctgtggagagcaagccagtaagcagcacccttcagctcctgcctccaagttcctgccctgtgtgagttcctgtcctgacttcctttgatgatgaatgtggcttggaagtgcaagctgaataagccttttccttgccaagttttttattttggtgtttcatcacagtaatagcaaccttgaccaagacagaagttggtaccagaagtagggtctttccctgaggcctccactccccttatttcgttttgaagcaggtctttccttaagtgttttatctccttgagcataggactcattacactccatcacacttgctggtagtcctctcttctctaactgtccctttgtatttctctttgtccagcttcctccttttccttatagatctgcaggatctcccaaggccattaatctaaaactcttcaatttggcctcaggcagatttttaggacaaggaataaaaacagcctcattctttgccaaaacatcacaataacaacctccaggtcacttactaatattctttccctctggaacttgaggtgggcccccacagttcaaattgccctccgcaccatctttcttgctcccactaggagagctcattagcactccttaaagtgcccaaatccttttctagtctaaagtcctccacattcctccaacaaacagcatggtcaggcctgttgcagcaataccacagtccctatgtggtggtttgaagagatatagcctccatagactcttgtgtttgagtgcttggcccatagggagtgacactattaggagatgtggccttgttggaggaagcatgtctctgtgggggcaggctttggggtgttcaaactacatacatacatacacacacacaactgcacacacacacacacacacacacacacacacacacatacacacacacacactccacctcccaccacccacaaataaattaagaaataaatttcaaaggtttaaaaagtaaatacataacacaaagaataaattactggcatatattcattgtaccaaacaatgagtttcactgtgatggtcacatgtctctgtatcatgtacttccctcaaatttagcctccaatggccctctctgtgcatctccattctttctggctccttctctttcaccagtagtgcctctttctgctttcatgtcatataaaaattttatgtcattatttttatgtcatataaattaatgagcctacaagtcctacctttagtgatagtcactctgagagtctagactttaacatgagaatctgagggaccatcagagtccataacagcacaggatagatgacagatagggacttgcattcagtgagtatgcacccgatgtcctgagcctctggaatgggtagagtggtaggaacaggacttcatatagagcagcaacagtactccagacctgtccaggatatgaagggctgagtggggtctttctcctcagggttgctgtctcccagaataccccagagagctgcagggagggggtctagcatcaggagtgaccacagagatgtggcatactgcagccacttaccacggtaacaccctaggcttagccaagatgagccctgtgttcttacctgtatgggcaagagagtatccctcagggggttagcttacaagcacagcgagtctgacaggtaacatggcatacagtaggtctcagcagaggaagaccagcctggactagaagcaaagaggtgcaatgatgcagatccctgcaaaacagctgttctgccaccctcaagaaaaagtgtcacttaagatgccagccctgccatgccatccacatacagcccattattaatcataataataatcataatgaagatgatttgggcttgtcattggtgggccagttgccacgggaacaggacaccctggggtgaatgtactaaccctgcctcctaaccctctcccaggcatgtgcctatgccagccccaggctaatgacatttatctgcctgacacacacaccctctcctgtcccagaggtccacagtccaccagccttggtagtcctggccatggctgggaatggttgtctaactcattttcagttccgtcttctgccttagacattcttactttggactgtcatctaaactccatccctgagttctccagataaatggatatatttggtggaggtgggggggaatgaggtatgcaatcatttctacccagtaatcacatagccctagccctggaggctgacgaaccctaaactagacactctcctattgccgtagttatctgaagtataaatgaatgtgcccatttggcacatggaaaaatagagacaagagtcttcctgagacctcacagctaataagcatcaaatgtattgctaagtctttatgtgccagtaggtattcttgactctagaagaaagatgccattcaactctgccaacctcaggatttgctggagggtctgggccctccatactaacaggagacacatagtataatgttctttgttctcaatagaggagaaattcttgacactggaatctggatcgttctcttctctattgtgtattaaatgggtgtcttagttagctgtgaacagataccatgaccaatgcaagtcttatgaaggacattcaattggggctggcttacagattcaaagggtcaatccattatcagtgtgggaacatggcagcatccaggcaggcatggtgcaggcagagctgagagctctacatcttcatctgaaagctacttgtggaagattgacttccaggcagctagggagaaggtcttaagcccaagcccacagtgacacacctactccaacaaggccacgcctcccaatagtgccactccctgggccgagcatatacaaaccatcataatgggtaagtttcaatgggagctattctttctgctcatggacctggagacatccctcattgctatagttagggagtgtgtgtgtgtgtgtgtgtgtgtgtgtgtgtgttgcttccagaaactactgggtggagaccaggggtctcaatgaaacatggtacaatgcatagaagagccccaccccacagagaagcgtctgtggtaatatagagcactgaggatgagaagccccgagttagaatagatttaacagtggccatctgactgcccctggctcctggtataggaatacaggcagtggatgaacagcccctgtgctggatagagaggtagcccaagcagacccccccccccccgcaattcacatacagtagcgagctgaagcttagtgatagatagccccagctcagtctccttccttcagccactgactagggatctctcaatagctgcttatccaggtggatctactgtgtaccctctgagaagagaaataacttggagagctctacatctaggctgttcctagcccctctcagccaactagcaaatacatcagcaagtctggaaccctgaacccccaaactcctgccaccccattaagagttttcttctgtttgcccagggtttctaagagtgtaggcattgagcagattttaaggagagaatgaacaagcgctttctagcttcgttttaatgtgtattggaaaaatactagtttctatttatggctgtgctaaaagtcatttattaaaatatatttaagttgttttatttttttttaaaaagaattggttttagtaaatcattatctagatctgggctgctagccagacaggtgtagctgtgtagatccaaccttaattaaagtggaatcaggggctgcgagatgctctgtgggtgaaggtgccgactgccaagccaagtgacctgagtttgatccccgagactatcacgctagaaagagagaactgattcctgcaagttgtcctctgatcaccacgtgagcagtnnnnnnnnnnnnnnnnnnnnnnnnnnnnnnnnnnnnnnnnnnnnnnnnnnnnnnnnnnnnnnnnnnnnnnnnnnnnnnnnnnnnnnnnnnnnnnnnnnnnnnnnnnnnnnnnnnnnnnnnnnnnnnnnnnnnnnnnnnnnnnnnnnnnnnnnnnnnnnnnnnnnnnnnnnnnnnnnnnnnnnnnnnnnnnnnnnnnnnnnnnnnnnnnnnnnnnnnnnnnnnnnnnnnnnnnnnnnnnnnnnnnnnnnnnnnnnnnnnnnnnnnnnnnnnnnnnnnnnnnnnnnnnnnnnnnnnnnnnnnnnnnnnnnnnnnnnnnnnnnnnnnnnnnnnnnnnnnnnnnnnnnnnnnnnnnnnnnnnnnnnnnnnnnnnnnnnnnnnnnnnnnnnnnnnnnnnnnnnnnnnnnnnnnnnnnnnnnnnnnnnnnnnnnnnnnnnnnnnnnnnnnnnnnnnnnnnnnnnnnnnnnnnnnnnnnnnnnnnnnnnnnnnnnnnnnnnnnnnnnnnnnnnnnnnnnnnnnnnnnnnnnnnnnnnnnnnnnnnnnnnnnnnnnnnnnnnnnnnnnnnnnnnnnnnggctcactggagggtcaagaaatgcccttggaggaaggtaggaaaccccgaccaaggtgtttctgggacttgcgatcagtgctacaaaacacgcctcatcttggttttgcctttccaggcgggacgacaaactgcggatccagaacggctggctgtgtcacctggccccagaaatcatccgccagctgtcccctgacacagaagaggacaagctcccattctccaagcactcggatgtctttgcgcttgggtaagagtggaccacacccctgcctttgacttccatggtgtgtgggtggggctactgcctagtgacacctttggaagagacagggcacatgttagcaaggacaaggagatagggtttccaagtaagcttgaaagtggaaagaataactgtaacacatttgcctgtctggagtctaaccaattttccagcaatggcaagttaccctattcattcactcattcattcattcattcattcatccattttgttcattgtgtatcgattcgttgttacattgttgcaacatttgtgcaccagttggccaatgagcccattccaagatggctgcccctgctcactcagctgtggtcagttctctaccctgctactcgaggaggctgcccaagcatgcgcccaacatgccaacgaagggccttgttgtaattatgagcttaagcctaaggaattacacagcatcacgcccaccagatttaagtttccttttttgaatgatattttttacatgcaacagggtgctttggcatgtttgtactttgcatgatgatggagaccagggaaattcacatgtctgtcagcttgcaactttctctgccttcagaagcatgctcaagtttcctaaataggagagcaactctaattaatcggaaggtgctgtctccttccgggggctccttgtaggcaagccactaagtgcagatggccttcaaggacaggaaatgtcctctctgccattttcagttaggaatgggttttagaacttatttggcttctcctttgcaaggtgctggggatgggagccggggccttgcgcacatgctaggcaaatgctatacttccgagtggctttgacctctctagggagatggttcagtcactgcttgtcacacagtcttgagggcctgagtttctaaccttagtgactatattaaacaacagggtgtctgggtgctggggaggcagatgcagaagggtccctagaactcaatggctagccaatcctagctacttttgtgaccctaagcctagtgagagaccccgcctcaaacaatacagtggagagaaattgaggtgagatagccaacatgacctctgacctccacacatttatacaaacttgcacatgtgtgtttataatcacaagtatgtttgcatatacacataagcacgtaacacatacatacagagagagacacacacacatacactaccaccaacagatgagaagaagcaaccaggaaattgctgtaccacatcccttaaataacctcactgtgcccatccctaaaatagcccttattcacaggatggatttggagagttgggagagagtgctgggaacactgacaagggaagctgcaaagcttgtaggttttaggcaatcagacctgtcatccctaaagcgcattagtgaggcagtcagtctcctgtagaaaagcgccccactgagccctcaccagcagctccaccccccccccaactgtgcattttaagaagatctcagtccccagagctcctcctttgagccccttgcaaagccatcacttgctctaactagttaatgcccagatctttatctagttagatatcattatctggaaccaaattgctgtaattaagttggtatatttttactgtgaatttagcgaaagaaaaaaaatgtaattaacaaaatgtactagagtcggtaattggtttcccactggagttttcggctataactttttttttttcttttcttgaaagtgaattttcctcttaaaagttgggttaggaaggaagttttaatgagcctcttattggtgacactgttagattgcaaaggaccccttgctctcagactccagccaattaggagcatcccgttgccagggaacctcatgttcaggaatgctttagagcacagagaaaccggtaaaagtgtacttgagcaccgcgttcagcttttcacgggtatggtagcccacggtcttcacaaacaccttcccaagttggcatcacgctgccctgggttgactgatgtgaaaagcaaagtcagatggctgttacctaccatgtggcaactggtggcagagctgggactcaggccaggaacaccctcattctgtgaccggagctttgcaccgagcagcccacagacccaggagccagtcacactcaaggtccccgcttctgtctgctgcagattaagcttaataaaaacctatgcaggaactggggagatggctcagtcctgtgtgtgtaccatgcaaacgtgaggacccgagttcaattcctagaacccacctaaaaagcagaaaaaggtagtacctgcctgtgatcctagcaccaggaaggcctaaacacatagacccctggagatttctgcccaggccagatgagctgatagggtccaggccagtgagagactccaaaaaacaaggtagaagcagtgtgtggcagtacatacctttaattccagcacacaggaggtagaagtaaggcagatttctatgagttcaaactcagtctggtctagattgtaagtttgagactagccagggtcacatagagagaccctgtctcaaataaacaaggtggacatagcaaggactgacacccgagggagacctctagcatccgcgtgcatgtgcacgtaagcacataagcacagacacacgtacatacatgcccacatcggcacatgtacacacgaaagaaaaagatagaagaccatcagtgagctgaagtcatggcttgggctctagatggggcacgggggacaacggaccttgagtgtcaacaactggtcgaagagatgtctgagtcaccccgtttgttgtaaaagactagctccctggtcagtcccttcctgtgtaccggagccagctcacctaggcaggggatggtccaccgggccagcaagtcaatcagccaatcaaagcatcagagtaaaaagacgccctgagcactaggcatggggctcagcgggaagtgcttgcttagggtgtaagaggccctgaatcctgtcccagcaactcaaaaccaggccaatctcgccttcctccaaagactgtgtcaagctgaccttcctactcccacactgaggccatatgagacactgggtcccatccccaacaccagagaaaataaaatccagaaggtatttttttccatttattatttatttttaactttattttaattttggggatagtatatttacatcattttcccttcgaccttcattttccccacattttttctttttcaaagtcctggtctcttttcccattcattgttatctcatacgtgtgtacatgacatacttattcttaaacataacccgctcagtctgtgtaatgtgacttgcatgtatgttttcagggctaaccatttggtattggataaccaattggtgtgctcttctctggggaagactgtttctcccgccctcagcatccttagtagctgtagttctttgtacagggtggagaccttctgggctttcccaacagcctgttgctgttgtccctgctcagcttatgtttgggcagcacgattaggagccagggagataattcagcaagtttcaggccatctcgggctacatagttttgagcactgttgccctcgcagaaatctagagtttggttcccagcaccccggcagctcacagatgtaactccagaatctctgatggcctcttctggcctccacaggcactcacaagtcacgtggctatataaccccacacactcttaactaaaaaataaaacaaaagtttaaatagaataaagttgcccatgaagacatgagttaacacagtccttgatcaggcaagagaatgccaaagtgctttgtgttcctgaaagaaaggcccggaagtctccttggggagcaggagctgggcaggggtggtggtgacagtgacatcatttcctgggattattgagatgttccctgaagtgagagacttgcttctcagggaatggaaactattggccacagtatggctcagtgacatgccagcttccccaagttcatccaccaccatgttcaccatgctcgcctcatttacataccatccagccatcaccccgaccacattcaagttctctgtcagcatcctttctcctgttattgcattgctgtgagttagggggcatgtggcctggcaaatatccatggagcaatcctggcaccgtgtgccctgatgcttggtgttcctcagagacacccttccataggcacagagagaaagggtggggctagcacagcatcatcccggtagcatagactatggccagtctgcatcacacactatgattcatctttacagcgcacaggtatgaaagtaagctcccgtcccactacttctcagcatgttgccgcctttcatgatcctccccgatccacgcatataaaagacccccatatgtattcctcatcccatttcttacacttagagtgatctattgagaaaattttatgtcaggtactatggtgctgtttcacttaaaagagttacttaccatcatacatacatctgctgacgactacagagatgttataccgtttccagctttttcagtgttacatattagatggtagagaacaacctcaagagtaaagtattcaaatatagggttttttttccaagtatagaattttaatatataattgcgagtggccaccgcactgtgttaaattattcaggtccagtttgtatccatcccggcatcaaaataggtattctgaaacaacaagcctaatgtctaacttcaagagggttttaaacaaattgtcaacccccttgagaagagactgcagagggaaatggccagccaggatgctgcccctgttggtgcagtgggtgacgaaaggggctccagggtcacacctgacacactgtcctgcagcaatgcctcattaactgtatccactgtctgacagcaccatctggtatgagctccacgccagggagtggccattcaagacccaaccagcagaggcaatcatttggcagatgggcacgggaatgaagcccaacctcagccagattggcatgggaaaagaaatctcggtaagtccctatgagaggcagggtctggggacacggagagaggccactgacacagtcctgagatttcctggtctcgggtatgaaggttatagacactttcccagagagtggctaagaaagtgacctgcttggagcttaaagggcaaattctcagcactatgcctgcaattccaggtggctgccaccaggggcgcaataacacttgctcgccctcttggcaatggattgctgcttcagataaaaccaaaatagaccacctggtctgttactttttaaaacaaaattcattaaaagatcacaaacagtactagcactcacttttccttgcatctcataatagtctgaaaccattatctaactcgaagtatactagacagaaatcaagaagtctgattgtaagtctgattgatcttccttttagacacaatgggggagaaccaataagtcagggaagcagtaattaccccaggtgtttgtcaggaccgcctacctccaggttcctcttgctgagcaaggagatggtggaaattagcttttctcctctgtatttttgaaggacacccactaatctagtgggatgtagctagcgactgtaggattccttctatcccttgctcaagaaaaataccaaggaaactccctgaagctattactggtcttgacaggtctctggccttctagcacggagcctccccggcttattaaagggtcttacaaagtatatgagaagagggcaaggagagagtgtcagtgggatatggtgagtgggtggatgaaagagggtagatgaagagaaataagggaaatgatataaaggaatggttatgcagattcatgctttgtggaccgagagatggatgaatgggtgggtgggatgttgtgtggatgaacggtgggtggtaagtggacagagagatgagagagtgtacataacttgtgtgtggatgaataaatggagggatagatgatgaatgaggatggctgagttcatatggatggatgggtgtatgttgtgaatgggtagatggtagtgtgaatgggtgatgggtgaatagataatggatactagaagaagaatgaatggatgagttgatggatggatgggtagatgatgagtagactgatgggtggctgggtggtgggatggctgtgtacatgaatggataggtagatggtggctagtgagtggatgcatgggtggatagatagatggatggtaggggtggctgtgtatatgaatgggtaggtgggtggtggttagtgaatggatagattgatagatggatgggtgaatgggtgggtggatggatcgatggatagatggatggatagatggatggatggatggatggatggatggatggatagatgaatacatggatagatggatggatggaaggatggatggatggatagatagatacatggatagatgaatggatggatggatagatagatgcatggatggatggatggatgggtgtgatggctgtatacatgagtgagcagatggctggtggctggtgattgagtggatggatagagtggctgggtgggatagctatgtttatgagtaggtagattgatcagtgggtagaagggtggttaatggagagatgtgaagtggaccaggtggatggacacctggctgacccagagccatgcccagaagctgagacttagacaaggactcaggaaagtcaccacttagatccagtcacgactctctggtctcttctaggacatactgctcttctgctgggccttcgagcaggaagagcggcccacctttaccaagctcatggacatgctagagaaactgccaaagcgaaaccgccgcctgtcgcaccccggacatttctggaagtctgcagagtatgtgtttacctcagccccctccccagctggattgcccattgatctttgtctccttttttgatcctctccctcaacccttccctgagctggcctcacccactctgtgcacccagcacccagtcaccacacttgtctaccagcatctgtctgtccaggggagcctattttgacattgaggtccccacagtatctactggtggctggcacagtgacctctgccttagctcttcctgatggcagatattgtctcaatctgaagagcacatggaaagaccaagttccatctgtcatgtgactagggtctcctccatgaagctcacaggcaaggcccctcccacctgcccctaccatgactgacacggctcccagcatcctcctttgcacgagtctagagacaggaagggatcccagcttttcctctgcatctgcttccttcttgggaggctccatgcccctccttgcccttgccttagctataggttcattgcctcctccaagaccaggaacatgcattttaccctggggtgccctccccaggcctgccgccatgacagatctctcacgaagatgaggaggctgcttagggggtctcatttcctgttgtctacctaggcactcccaggtcagctcacaccgacttaggtatatacacatgtatgaacactgaaacagtactccacacaaacttatacatacatacatacatacagagagagagagagagagagagagagagacagagagagagagagacagagagagagagagagaagggcaggcactcagttgtgtacatacctccatacacaggaatatcccatggaagaaacccctaaagccagctcatgtaggcaaattcaggaacaaacacagtcagttacttagtgatactgtaaggcacgtgagacacatgtatacccacactgaacactgccctggctcttcaccaggcatgcctacacacagatatgtagatactgcttacacaatgggaccccatgaagatcccaggagctgggtgaggagatatccctagcctctgatctttgcatttgttctcaccccgagactcaccttttccctgggaaattagaaagaacacagaatccactagcagaggggcacaggttgaaatttcctctctgctgttaataatccttgtggctcaggcatatccattggcttctatgagctataatttcatgctctgaacattgagggcagcagaacccatagcggggatactgtgagggcccagcaaggtcgtgtgcttggcaccgggcacactgagcctcagataaccaatgttcactctgccctggcaaccgccgtgtgctagaaggaagtcagtgcctcggactggcatcgtggtggcacttagaaccagtcatgcaagaaacaggcaggaggcagctcaaacaggctcggctctgcctgctgagagagtccagaagagggagagagctggcttgggagttcaggcaagacctcagagtacctggtgttctaaaactccaaagtcctttgggctagcaccaagcccgtgagcaaaagcattcaactgagcattgaagaggaagaaagccttgttttctaggttcttctctggacataaactgaagagactaaagaaacagagggataagttgtggtcctgtgtcccgcgaggctagacatcctgtagaatcttccattcagtcttccattattcgttctgtgggctgaactcccacggggaatcagaacccattctaagaggtgaatgcaggatcatgagggtctgctgctgttgccactgtcaaatctgccacacaggtctggtctggcaccccaggtccccatattcagcaatgtgtcaagtttttcccaacctaaacagtggactacctactgtagtagggagtactgggttcaaattttgaccttgatacttcttagctgtgcaccacaggcaaatcatataacctccctgagccctgaattttatttggaaaaaggatacaaaatgccacaactaaacctcttccccggcttacatgagatcagggacagcccacactcagtgtgtagagtctagtgtacaaaaaaaaaaaccgttgtcagtaggagtcccttctgcttggaaagggcaggagcccactggaagccaccctctgagaagatgctagcacataaaagatgtcatagtgggacctacatcgctctaatccaccctttcttctctcccccttccaggctgtgaccatggccagcatcagctgcctcacccccaaaccgcctctgtaaccctgctctgccctctgccagctcaggaggcccaggctcactgtcagggagtcctgactcggctcagcctgggagacctgtgtgatgacgtcacagaggctgtccacacctttgacttgtaccccgttactcaggcacgatcagggaccactcaactaggaccaaactgggccagagagggtcccatgtgtggtgtgaaggagccacagactgagcacaccacctcggactgtggagaccaagacacatgcccagtgggcagactcagactcacacgctggaccagtgtgtgcgcatgtgtctacacatggacagggccaactgctatccttctgcctggacgagccagctgtggagtgtcccagctgtgctatcctggaacacagaaccaggatggaaccagaaacaatacacctgctccgttgtcaaggcttctaggccaaggtcagggtagggaggtggggtgggttaaacttgcaaacatctgattttagaggtcccattccaagatggaagtcaccggttgccgctgagcacacaattctgaaggacagtaggcagtcctgcaggtcttttttagcacagggcctctctggggaccagtccctggccttcacccttctcccattttgtaagaacactgttctaactcacctcatgcccacgctaccctgggcaactggagaacaccatagcgtttcagctgatgtgacatttggtgtgacctttaccagttcaccatcattcatggcttcccccaaagtcccgagtcctgagaaccggggctgtggcaagagagttctggtgtgttctctctgtggggctagcaatgccggggttaagttctccctcggtgatggagacggtcctgggtatgcatgatgggttacatgggtgtgtgtgtgtgtgtaactgtttacaatggtctccctgcctctcatgggctgtgttccaggagaatgcacatagagaggttctgtggtctctgctgtcgcctggtgctgaatcctgagtggtttccccactgaggaccctgtgaccctgtgacccttggcccctcccttattgtgcacactcagcaccccatcttccaagcctttcttcatcccccaccttcttttgggaaggggtggcacagagtgaatgggaaggagagccctgaggtcactggtccacatgcccaaagccatgccccccagtgatcagacctgacacaagaggcaaagctgtccctaagcagagaattagcagggttagccagacagcaaaatccatgtaaacatacaaaaccaccccccctttttgagtggccctattggatgtacacactaggaccaagcacgggtccaaagcaggaagactgattgacagtagtcacacttctagagagatgtaccccatgacactttcaagtcttttcagaaccttctcacccctttgcaaagctcttgccgtctgcacccgggaccccgggacccacacaagttgtccccatgtgaacatcctgcctctcctggtgacatctgtctctggctcagcttctctgcctcttacagacagtttccctgtacatttgcttatggccctgggctccagagtcgctgaagaccactctccacagcagctgtaaccccatctaacaagccctgttctggatatatctctgtggccagggctggactgagactgaccccctcctactaagcatcttagagtttctcttttctctttaattgcatcaggacccctttggtccatgtaccccggtctctgtcacatgcctttgtatcttggaggaagtaagagaggagagagccagggagggctgaagctctgggaccctgaagtgtcccccgggaactgggactcactcatcttctcctgtttgtagctcaatgacccagtgggtcacagttctaggcgctccaaggaagccaggggagggggactcctca

SEQ ID NO: 7 - DNA, 333 bp, Homo sapiens
gaccacatccctgtcccttaccagccagactccagcagcaacccctcctccacgacgtcctccacgccctcctcgccagcaccccccctccctcctagtgccacgccgccttctcccctacacccttccccacagtgcacacggcagcagaagaacttcaacctgccagcatcccactactacaaatacaagcagcagttcatcttcccagatgtggtgccggtgccggagacgccgacccgggcgccccaggtcatcctgcatccggtgacctcgaatccaatcttggaaggaaatccattacttcaaattgaagtggagccaacgtcggag

SEQ ID NO: 8 - DNA, 20 bp, Homo sapiens
gaccacatccctgtccctta

SEQ ID NO: 9 - DNA, 20 bp, Homo sapiens
ctccgacgttggctccactt

SEQ ID NO: 10 - protein, 8 aa, Artificial
  artificial antigenic epitope
DYKDDDDK

SEQ ID NO: 11 - DNA, 21 bp, Homo sapiens
aatgtccacatgtcaggaggc

SEQ ID NO: 12 - DNA, 21 bp, Homo sapiens
aacaagactggaccatccagt

SEQ ID NO: 13 - DNA, 21 bp, Homo sapiens
aagtgcgtccagcactattgt

SEQ ID NO: 14 - DNA, 21 bp, Homo sapiens
aacctcaagatccacagcagc

SEQ ID NO: 15 - DNA, 21 bp, Homo sapiens
aagtactggatgtctcagacg

SEQ ID NO: 16 - DNA, 21 bp, Homo sapiens
aaggttagtccggacagagtc

SEQ ID NO: 17 - DNA, 21 bp, Homo sapiens
aagccacctcgctattcagac

SEQ ID NO: 18 - DNA, 21 bp, Homo sapiens
aagaacttcaacctgccagca

SEQ ID NO: 19 - DNA, 21 bp, Homo sapiens
aacttcaacctgccagcatcc

SEQ ID NO: 20 - DNA, 21 bp, Homo sapiens
aattgaagtggagccaacgtc

SEQ ID NO: 21 - DNA, 21 bp, Homo sapiens
aacgtcggagaatgaagaggt

SEQ ID NO: 22 - DNA, 21 bp, Homo sapiens
aagagtcagaggatgacttcg

SEQ ID NO: 23 - DNA, 21 bp, Homo sapiens
aaccaggcagattgctcaaga

SEQ ID NO: 24 - DNA, 21 bp, Homo sapiens
aacgtcttctatgacaacggc

SEQ ID NO: 25 - DNA, 21 bp, Homo sapiens
aactgcgcatccagaatggct

SEQ ID NO: 26 - DNA, 21 bp, Homo sapiens
aatctggtatgaactccacgc

SEQ ID NO: 27 - DNA, 21 bp, Homo sapiens
aacctcagccagattggcatg

SEQ ID NO: 28 - DNA, 21 bp, Homo sapiens
aagagagacctaccttcacca

SEQ ID NO: 29 - RNA, 21 nt, Artificial
  siRNA polynucleotide, synthesized
uguccacaugucaggaggcuu

SEQ ID NO: 30 - RNA, 21 nt, Artificial
  siRNA polynucleotide, synthesized
caagacuggaccauccaguuu

SEQ ID NO: 31 - RNA, 21 nt, Artificial
  siRNA polynucleotide, synthesized
gugcguccagcacuauuguuu

SEQ ID NO: 32 - RNA, 21 nt, Artificial
  siRNA polynucleotide, synthesized
ccucaagauccacagcagcuu

SEQ ID NO: 33 - RNA, 21 nt, Artificial
  siRNA polynucleotide, synthesized
guacuggaugucucagacguu

SEQ ID NO: 34 - RNA, 21 nt, Artificial
  siRNA polynucleotide, synthesized
gguuaguccggacagagucuu

SEQ ID NO: 35 - RNA, 21 nt, Artificial
  siRNA polynucleotide, synthesized
gccaccucgcuauucagacuu

SEQ ID NO: 36 - RNA, 21 nt, Artificial
  siRNA polynucleotide, synthesized
gaacuucaaccugccagcauu

SEQ ID NO: 37 - RNA, 21 nt, Artificial
  siRNA polynucleotide, synthesized
cuucaaccugccagcauccuu

SEQ ID NO: 38 - RNA, 21 nt, Artificial
  siRNA polynucleotide, synthesized
uugaaguggagccaacgucuu

SEQ ID NO: 39 - RNA, 21 nt, Artificial
  siRNA polynucleotide, synthesized
cgucggagaaugaagagguuu

SEQ ID NO: 40 - RNA, 21 nt, Artificial
  siRNA polynucleotide, synthesized
gagucagaggaugacuucguu

SEQ ID NO: 41 - RNA, 21 nt, Artificial
  siRNA polynucleotide, synthesized
ccaggcagauugcucaagauu

SEQ ID NO: 42 - RNA, 21 nt, Artificial
  siRNA polynucleotide, synthesized
cgucuucuaugacaacggcuu

SEQ ID NO: 43 - RNA, 21 nt, Artificial
  siRNA polynucleotide, synthesized
cugcgcauccagaauggcuuu

SEQ ID NO: 44 - RNA, 21 nt, Artificial
  siRNA polynucleotide, synthesized
ucugguaugaacuccacgcuu

SEQ ID NO: 45 - RNA, 21 nt, Artificial
  siRNA polynucleotide, synthesized
ccucagccagauuggcauguu

SEQ ID NO: 46 - RNA, 21 nt, Artificial
  siRNA polynucleotide, synthesized
gagagaccuaccuucaccauu

SEQ ID NO: 47 - RNA, 21 nt, Artificial
  siRNA polynucleotide, synthesized
uuacagguguacaguccuccg

SEQ ID NO: 48 - RNA, 21 nt, Artificial
  siRNA polynucleotide, synthesized
uuguucugaccugguagguca

SEQ ID NO: 49 - RNA, 21 nt, Artificial
  siRNA polynucleotide, synthesized
uucacgcaggucgugauaaca

SEQ ID NO: 50 - RNA, 21 nt, Artificial
  siRNA polynucleotide, synthesized
uuggaguucuaggugucgucg

SEQ ID NO: 51 - RNA, 21 nt, Artificial
  siRNA polynucleotide, synthesized
uucaugaccuacagagucugc

SEQ ID NO: 52 - RNA, 21 nt, Artificial
  siRNA polynucleotide, synthesized
uuccaaucaggccugucucag

SEQ ID NO: 53 - RNA, 21 nt, Artificial
  siRNA polynucleotide, synthesized
uucgguggagcgauaagucug

SEQ ID NO: 54 - RNA, 21 nt, Artificial
  siRNA polynucleotide, synthesized
uucuugaaguuggacggucgu

SEQ ID NO: 55 - RNA, 21 nt, Artificial
  siRNA polynucleotide, synthesized
uugaaguuggacggucguagg

SEQ ID NO: 56 - RNA, 21 nt, Artificial
  siRNA polynucleotide, synthesized
uuaacuucaccucgguugcag

SEQ ID NO: 57 - RNA, 21 nt, Artificial
  siRNA polynucleotide, synthesized
uugcagccucuuacuucucca

SEQ ID NO: 58 - RNA, 21 nt, Artificial
  siRNA polynucleotide, synthesized
uucucagucuccuacugaagc

SEQ ID NO: 59 - RNA, 21 nt, Artificial
  siRNA polynucleotide, synthesized
uugguccgucuaacgaguucu

SEQ ID NO: 60 - RNA, 21 nt, Artificial
  siRNA polynucleotide, synthesized
uugcagaagauacuguugccg

SEQ ID NO: 61 - RNA, 21 nt, Artificial
  siRNA polynucleotide, synthesized
uugacgcguaggucuuaccga

SEQ ID NO: 62 - RNA, 21 nt, Artificial
  siRNA polynucleotide, synthesized
uuagaccauacuugaggugcg

SEQ ID NO: 63 - RNA, 21 nt, Artificial
  siRNA polynucleotide, synthesized
uuggagucggucuaaccguac

SEQ ID NO: 64 - RNA, 21 nt, Artificial
  siRNA polynucleotide, synthesized
uucucucuggauggaaguggu

SEQ ID NO: 65 - DNA, 21 bp, Homo sapiens
caggaatgtccacatgtcagg

SEQ ID NO: 66 - DNA, 21 bp, Homo sapiens
cacatgtcaggaggcaacctt

SEQ ID NO: 67 - DNA, 21 bp, Homo sapiens
caagtgcgtccagcactattg

SEQ ID NO: 68 - DNA, 21 bp, Homo sapiens
cagcactattgtcacaccagc

SEQ ID NO: 69 - DNA, 21 bp, Homo sapiens
cacactgaggccaacttctct

SEQ ID NO: 70 - DNA, 21 bp, Homo sapiens
cagagatctcggcaactccat

SEQ ID NO: 71 - DNA, 21 bp, Homo sapiens
caactccatcaagcacaggtt

SEQ ID NO: 72 - DNA, 21 bp, Homo sapiens
caccaagtactggatgtctca

SEQ ID NO: 73 - DNA, 21 bp, Homo sapiens
caagtactggatgtctcagac

SEQ ID NO: 74 - DNA, 21 bp, Homo sapiens
catcttctgatcatccaccga

SEQ ID NO: 75 - DNA, 21 bp, Homo sapiens
caaggttagtccggacagagt

SEQ ID NO: 76 - DNA, 21 bp, Homo sapiens
cagacctgcacatcagtcaga

SEQ ID NO: 77 - DNA, 21 bp, Homo sapiens
cacacggcagcagaagaactt

SEQ ID NO: 78 - DNA, 21 bp, Homo sapiens
cacggcagcagaagaacttca

SEQ ID NO: 79 - DNA, 21 bp, Homo sapiens
cagcagaagaacttcaacctg

SEQ ID NO: 80 - DNA, 21 bp, Homo sapiens
cagaagaacttcaacctgcca

SEQ ID NO: 81 - DNA, 21 bp, Homo sapiens
caacgtcggagaatgaagagg

SEQ ID NO: 82 - DNA, 21 bp, Homo sapiens
catgatgaggccgaagagtca

SEQ ID NO: 83 - DNA, 21 bp, Homo sapiens
cagaggatgacttcgaggaga

SEQ ID NO: 84 - DNA, 21 bp, Homo sapiens
cagaccagcatcttccttcag

SEQ ID NO: 85 - DNA, 21 bp, Homo sapiens
cagcatcttccttcaggagtg

SEQ ID NO: 86 - DNA, 21 bp, Homo sapiens
catccggctgattgacattga

SEQ ID NO: 87 - DNA, 21 bp, Homo sapiens
catcatcaccagcctctgtaa

SEQ ID NO: 88 - DNA, 21 bp, Homo sapiens
catccagaatggctggctatg

SEQ ID NO: 89 - DNA, 21 bp, Homo sapiens
caatctggtatgaactccacg

SEQ ID NO: 90 - DNA, 21 bp, Homo sapiens
caaccagcagaggcaataatc

SEQ ID NO: 91 - DNA, 21 bp, Homo sapiens
cagcagaggcaataatctggc

SEQ ID NO: 92 - DNA, 21 bp, Homo sapiens
caacctcagccagattggcat

SEQ ID NO: 93 - DNA, 21 bp, Homo sapiens
caagaagagagacctaccttc

SEQ ID NO: 94 - RNA, 21 nt, Artificial
  siRNA polynucleotide, synthesized
ggaauguccacaugucagguu

SEQ ID NO: 95 - RNA, 21 nt, Artificial
  siRNA polynucleotide, synthesized
caugucaggaggcaaccuuuu

SEQ ID NO: 96 - RNA, 21 nt, Artificial
  siRNA polynucleotide, synthesized
agugcguccagcacuauuguu

SEQ ID NO: 97 - RNA, 21 nt, Artificial
  siRNA polynucleotide, synthesized
gcacuauugucacaccagcuu

SEQ ID NO: 98 - RNA, 21 nt, Artificial
  siRNA polynucleotide, synthesized
cacugaggccaacuucucuuu

SEQ ID NO: 99 - RNA, 21 nt, Artificial
  siRNA polynucleotide, synthesized
gagaucucggcaacuccauuu

SEQ ID NO: 100 - RNA, 21 nt, Artificial
  siRNA polynucleotide, synthesized
acuccaucaagcacagguuuu

SEQ ID NO: 101 - RNA, 21 nt, Artificial
  siRNA polynucleotide, synthesized
ccaaguacuggaugucucauu

SEQ ID NO: 102 - RNA, 21 nt, Artificial
  siRNA polynucleotide, synthesized
aguacuggaugucucagacuu

SEQ ID NO: 103 - RNA, 21 nt, Artificial
  siRNA polynucleotide, synthesized
ucuucugaucauccaccgauu

SEQ ID NO: 104 - RNA, 21 nt, Artificial
  siRNA polynucleotide, synthesized
agguuaguccggacagaguuu

SEQ ID NO: 105 - RNA, 21 nt, Artificial
  siRNA polynucleotide, synthesized
gaccugcacaucagucagauu

SEQ ID NO: 106 - RNA, 21 nt, Artificial
  siRNA polynucleotide, synthesized
cacggcagcagaagaacuuuu

SEQ ID NO: 107 - RNA, 21 nt, Artificial
  siRNA polynucleotide, synthesized
cggcagcagaagaacuucauu

SEQ ID NO: 108 - RNA, 21 nt, Artificial
  siRNA polynucleotide, synthesized
gcagaagaacuucaaccuguu

SEQ ID NO: 109 - RNA, 21 nt, Artificial
  siRNA polynucleotide, synthesized
gaagaacuucaaccugccauu

SEQ ID NO: 110 - RNA, 21 nt, Artificial
  siRNA polynucleotide, synthesized
acgucggagaaugaagagguu

SEQ ID NO: 111 - RNA, 21 nt, Artificial
  siRNA polynucleotide, synthesized
ugaugaggccgaagagucauu

SEQ ID NO: 112 - RNA, 21 nt, Artificial
  siRNA polynucleotide, synthesized
gaggaugacuucgaggagauu

SEQ ID NO: 113 - RNA, 21 nt, Artificial
  siRNA polynucleotide, synthesized
gaccagcaucuuccuucaguu

SEQ ID NO: 114 - RNA, 21 nt, Artificial
  siRNA polynucleotide, synthesized
gcaucuuccuucaggaguguu

SEQ ID NO: 115 - RNA, 21 nt, Artificial
  siRNA polynucleotide, synthesized
uccggcugauugacauugauu

SEQ ID NO: 116 - RNA, 21 nt, Artificial
  siRNA polynucleotide, synthesized
ucaucaccagccucuguaauu

SEQ ID NO: 117 - RNA, 21 nt, Artificial
  siRNA polynucleotide, synthesized
uccagaauggcuggcuauguu

SEQ ID NO: 118 - RNA, 21 nt, Artificial
  siRNA polynucleotide, synthesized
aucugguaugaacuccacguu

SEQ ID NO: 119 - RNA, 21 nt, Artificial
  siRNA polynucleotide, synthesized
accagcagaggcaauaaucuu

SEQ ID NO: 120 - RNA, 21 nt, Artificial
  siRNA polynucleotide, synthesized
gcagaggcaauaaucuggcuu

SEQ ID NO: 121 - RNA, 21 nt, Artificial
  siRNA polynucleotide, synthesized
accucagccagauuggcauuu

SEQ ID NO: 122 - RNA, 21 nt, Artificial
  siRNA polynucleotide, synthesized
agaagagagaccuaccuucuu

SEQ ID NO: 123 - RNA, 21 nt, Artificial
  siRNA polynucleotide, synthesized
uuccuuacagguguacagucc

SEQ ID NO: 124 - RNA, 21 nt, Artificial
  siRNA polynucleotide, synthesized
uuguacaguccuccguuggaa

SEQ ID NO: 125 - RNA, 21 nt, Artificial
  siRNA polynucleotide, synthesized
uuucacgcaggucgugauaac

SEQ ID NO: 126 - RNA, 21 nt, Artificial
  siRNA polynucleotide, synthesized
uucgugauaacaguguggucg

SEQ ID NO: 127 - RNA, 21 nt, Artificial
  siRNA polynucleotide, synthesized
uugugacuccgguugaagaga

SEQ ID NO: 128 - RNA, 21 nt, Artificial
  siRNA polynucleotide, synthesized
uucucuagagccguugaggua

SEQ ID NO: 129 - RNA, 21 nt, Artificial
  siRNA polynucleotide, synthesized
uuugagguaguucguguccaa

SEQ ID NO: 130 - RNA, 21 nt, Artificial
  siRNA polynucleotide, synthesized
uugguucaugaccuacagagu

SEQ ID NO: 131 - RNA, 21 nt, Artificial
  siRNA polynucleotide, synthesized
uuucaugaccuacagagucug

SEQ ID NO: 132 - RNA, 21 nt, Artificial
  siRNA polynucleotide, synthesized
uuagaagacuaguagguggcu

SEQ ID NO: 133 - RNA, 21 nt, Artificial
  siRNA polynucleotide, synthesized
uuuccaaucaggccugucuca

SEQ ID NO: 134 - RNA, 21 nt, Artificial
  siRNA polynucleotide, synthesized
uucuggacguguagucagucu

SEQ ID NO: 135 - RNA, 21 nt, Artificial
  siRNA polynucleotide, synthesized
uugugccgucgucuucuugaa

SEQ ID NO: 136 - RNA, 21 nt, Artificial
  siRNA polynucleotide, synthesized
uugccgucgucuucuugaagu

SEQ ID NO: 137 - RNA, 21 nt, Artificial
  siRNA polynucleotide, synthesized
uucgucuucuugaaguuggac

SEQ ID NO: 138 - RNA, 21 nt, Artificial
  siRNA polynucleotide, synthesized
uucuucuugaaguuggacggu

SEQ ID NO: 139 - RNA, 21 nt, Artificial
  siRNA polynucleotide, synthesized
uuugcagccucuuacuucucc

SEQ ID NO: 140 - RNA, 21 nt, Artificial
  siRNA polynucleotide, synthesized
uuacuacuccggcuucucagu

SEQ ID NO: 141 - RNA, 21 nt, Artificial
  siRNA polynucleotide, synthesized
uucuccuacugaagcuccucu

SEQ ID NO: 142 - RNA, 21 nt, Artificial
  siRNA polynucleotide, synthesized
uucuggucguagaaggaaguc

SEQ ID NO: 143 - RNA, 21 nt, Artificial
  siRNA polynucleotide, synthesized
uucguagaaggaaguccucac

SEQ ID NO: 144 - RNA, 21 nt, Artificial
  siRNA polynucleotide, synthesized
uuaggccgacuaacuguaacu

SEQ ID NO: 145 - RNA, 21 nt, Artificial
  siRNA polynucleotide, synthesized
uuaguaguggucggagacauu

SEQ ID NO: 146 - RNA, 21 nt, Artificial
  siRNA polynucleotide, synthesized
uuaggucuuaccgaccgauac

SEQ ID NO: 147 - RNA, 21 nt, Artificial
  siRNA polynucleotide, synthesized
uuuagaccauacuugaggugc

SEQ ID NO: 148 - RNA, 21 nt, Artificial
  siRNA polynucleotide, synthesized
uuuggucgucuccguuauuag

SEQ ID NO: 149 - RNA, 21 nt, Artificial
  siRNA polynucleotide, synthesized
uucgucuccguuauuagaccg

SEQ ID NO: 150 - RNA, 21 nt, Artificial
  siRNA polynucleotide, synthesized
uuuggagucggucuaaccgua

SEQ ID NO: 151 - RNA, 21 nt, Artificial
  siRNA polynucleotide, synthesized
uuucuucucucuggauggaag

SEQ ID NO: 152 - DNA, 21 bp, Homo sapiens
gaatgtccacatgtcaggagg

SEQ ID NO: 153 - DNA, 21 bp, Homo sapiens
gaagaagaacaagctgaagcc

SEQ ID NO: 154 - DNA, 21 bp, Homo sapiens
gaacctcaagatccacagcag

SEQ ID NO: 155 - DNA, 21 bp, Homo sapiens
gagatctcggcaactccatca

SEQ ID NO: 156 - DNA, 21 bp, Homo sapiens
gatctcggcaactccatcaag

SEQ ID NO: 157 - DNA, 21 bp, Homo sapiens
gatgtctcagacgtgcacagt

SEQ ID NO: 158 - DNA, 21 bp, Homo sapiens
gaggagatccagcaaggttag

SEQ ID NO: 159 - DNA, 21 bp, Homo sapiens
gagatccagcaaggttagtcc

SEQ ID NO: 160 - DNA, 21 bp, Homo sapiens
gaagccacctcgctattcaga

SEQ ID NO: 161 - DNA, 21 bp, Homo sapiens
gaagaacttcaacctgccagc

SEQ ID NO: 162 - DNA, 21 bp, Homo sapiens
gaacttcaacctgccagcatc

SEQ ID NO: 163 - DNA, 21 bp, Homo sapiens
gacctcgaatccaatcttgga

SEQ ID NO: 164 - DNA, 21 bp, Homo sapiens
gagccaacgtcggagaatgaa

SEQ ID NO: 165 - DNA, 21 bp, Homo sapiens
gaagagtcagaggatgacttc

SEQ ID NO: 166 - DNA, 21 bp, Homo sapiens
gagtcagaggatgacttcgag

SEQ ID NO: 167 - DNA, 21 bp, Homo sapiens
gaggatgacttcgaggagatg

SEQ ID NO: 168 - DNA, 21 bp, Homo sapiens
gatgacttcgaggagatgaac

SEQ ID NO: 169 - DNA, 21 bp, Homo sapiens
gacttcgaggagatgaacctg

SEQ ID NO: 170 - DNA, 21 bp, Homo sapiens
gaccagcatcttccttcagga

SEQ ID NO: 171 - DNA, 21 bp, Homo sapiens
gacgctctattccgttgtgag

SEQ ID NO: 172 - DNA, 21 bp, Homo sapiens
gaatcctacacaaggacctca

SEQ ID NO: 173 - DNA, 21 bp, Homo sapiens
gaacgtcttctatgacaacgg

SEQ ID NO: 174 - DNA, 21 bp, Homo sapiens
gacacagaggaggataagctc

SEQ ID NO: 175 - DNA, 21 bp, Homo sapiens
gacattcttctcttctgctgg

SEQ ID NO: 176 - DNA, 21 bp, Homo sapiens
gaacaagaagagagacctacc

SEQ ID NO: 177 - DNA, 21 bp, Homo sapiens
gaagagagacctaccttcacc

SEQ ID NO: 178 - DNA, 21 bp, Homo sapiens
gagagacctaccttcaccaag

SEQ ID NO: 179 - DNA, 21 bp, Homo sapiens
gagacctaccttcaccaagct

SEQ ID NO: 180 - DNA, 21 bp, Homo sapiens
gacctaccttcaccaagctca

SEQ ID NO: 181 - RNA, 21 nt, Artificial
  siRNA polynucleotide, synthesized
auguccacaugucaggagguu

SEQ ID NO: 182 - RNA, 21 nt, Artificial
  siRNA polynucleotide, synthesized
agaagaacaagcugaagccuu

SEQ ID NO: 183 - RNA, 21 nt, Artificial
  siRNA polynucleotide, synthesized
accucaagauccacagcaguu

SEQ ID NO: 184 - RNA, 21 nt, Artificial
  siRNA polynucleotide, synthesized
gaucucggcaacuccaucauu

SEQ ID NO: 185 - RNA, 21 nt, Artificial
  siRNA polynucleotide, synthesized
ucucggcaacuccaucaaguu

SEQ ID NO: 186 - RNA, 21 nt, Artificial
  siRNA polynucleotide, synthesized
ugucucagacgugcacaguuu

SEQ ID NO: 187 - RNA, 21 nt, Artificial
  siRNA polynucleotide, synthesized
ggagauccagcaagguuaguu

SEQ ID NO: 188 - RNA, 21 nt, Artificial
  siRNA polynucleotide, synthesized
gauccagcaagguuaguccuu

SEQ ID NO: 189 - RNA, 21 nt, Artificial
  siRNA polynucleotide, synthesized
agccaccucgcuauucagauu

SEQ ID NO: 190 - RNA, 21 nt, Artificial
  siRNA polynucleotide, synthesized
agaacuucaaccugccagcuu

SEQ ID NO: 191 - RNA, 21 nt, Artificial
  siRNA polynucleotide, synthesized
acuucaaccugccagcaucuu

SEQ ID NO: 192 - RNA, 21 nt, Artificial
  siRNA polynucleotide, synthesized
ccucgaauccaaucuuggauu

SEQ ID NO: 193 - RNA, 21 nt, Artificial
  siRNA polynucleotide, synthesized
gccaacgucggagaaugaauu

SEQ ID NO: 194 - RNA, 21 nt, Artificial
  siRNA polynucleotide, synthesized
agagucagaggaugacuucuu

SEQ ID NO: 195 - RNA, 21 nt, Artificial
  siRNA polynucleotide, synthesized
gucagaggaugacuucgaguu

SEQ ID NO: 196 - RNA, 21 nt, Artificial
  siRNA polynucleotide, synthesized
ggaugacuucgaggagauguu

SEQ ID NO: 197 - RNA, 21 nt, Artificial
  siRNA polynucleotide, synthesized
ugacuucgaggagaugaacuu

SEQ ID NO: 198 - RNA, 21 nt, Artificial
  siRNA polynucleotide, synthesized
cuucgaggagaugaaccuguu

SEQ ID NO: 199 - RNA, 21 nt, Artificial
  siRNA polynucleotide, synthesized
ccagcaucuuccuucaggauu

SEQ ID NO: 200 - RNA, 21 nt, Artificial
  siRNA polynucleotide, synthesized
cgcucuauuccguugugaguu

SEQ ID NO: 201 - RNA, 21 nt, Artificial
  siRNA polynucleotide, synthesized
auccuacacaaggaccucauu

SEQ ID NO: 202 - RNA, 21 nt, Artificial
  siRNA polynucleotide, synthesized
acgucuucuaugacaacgguu

SEQ ID NO: 203 - RNA, 21 nt, Artificial
  siRNA polynucleotide, synthesized
cacagaggaggauaagcucuu

SEQ ID NO: 204 - RNA, 21 nt, Artificial
  siRNA polynucleotide, synthesized
cauucuucucuucugcugguu

SEQ ID NO: 205 - RNA, 21 nt, Artificial
  siRNA polynucleotide, synthesized
acaagaagagagaccuaccuu

SEQ ID NO: 206 - RNA, 21 nt, Artificial
  siRNA polynucleotide, synthesized
agagagaccuaccuucaccuu

SEQ ID NO: 207 - RNA, 21 nt, Artificial
  siRNA polynucleotide, synthesized
gagaccuaccuucaccaaguu

SEQ ID NO: 208 - RNA, 21 nt, Artificial
  siRNA polynucleotide, synthesized
gaccuaccuucaccaagcuuu

SEQ ID NO: 209 - RNA, 21 nt, Artificial
  siRNA polynucleotide, synthesized
ccuaccuucaccaagcucauu

SEQ ID NO: 210 - RNA, 21 nt, Artificial
  siRNA polynucleotide, synthesized
uuuacagguguacaguccucc

SEQ ID NO: 211 - RNA, 21 nt, Artificial
  siRNA polynucleotide, synthesized
uuucuucuuguucgacuucgg

SEQ ID NO: 212 - RNA, 21 nt, Artificial
  siRNA polynucleotide, synthesized
uuuggaguucuaggugucguc

SEQ ID NO: 213 - RNA, 21 nt, Artificial
  siRNA polynucleotide, synthesized
uucuagagccguugagguagu

SEQ ID NO: 214 - RNA, 21 nt, Artificial
  siRNA polynucleotide, synthesized
uuagagccguugagguaguuc

SEQ ID NO: 215 - RNA, 21 nt, Artificial
  siRNA polynucleotide, synthesized
uuacagagucugcacguguca

SEQ ID NO: 216 - RNA, 21 nt, Artificial
  siRNA polynucleotide, synthesized
uuccucuaggucguuccaauc

SEQ ID NO: 217 - RNA, 21 nt, Artificial
  siRNA polynucleotide, synthesized
uucuaggucguuccaaucagg

SEQ ID NO: 218 - RNA, 21 nt, Artificial
  siRNA polynucleotide, synthesized
uuucgguggagcgauaagucu

SEQ ID NO: 219 - RNA, 21 nt, Artificial
  siRNA polynucleotide, synthesized
uuucuugaaguuggacggucg

SEQ ID NO: 220 - RNA, 21 nt, Artificial
  siRNA polynucleotide, synthesized
uuugaaguuggacggucguag

SEQ ID NO: 221 - RNA, 21 nt, Artificial
  siRNA polynucleotide, synthesized
uuggagcuuagguuagaaccu

SEQ ID NO: 222 - RNA, 21 nt, Artificial
  siRNA polynucleotide, synthesized
uucgguugcagccucuuacuu

SEQ ID NO: 223 - RNA, 21 nt, Artificial
  siRNA polynucleotide, synthesized
uuucucagucuccuacugaag

SEQ ID NO: 224 - RNA, 21 nt, Artificial
  siRNA polynucleotide, synthesized
uucagucuccuacugaagcuc

SEQ ID NO: 225 - RNA, 21 nt, Artificial
  siRNA polynucleotide, synthesized
uuccuacugaagcuccucuac

SEQ ID NO: 226 - RNA, 21 nt, Artificial
  siRNA polynucleotide, synthesized
uuacugaagcuccucuacuug

SEQ ID NO: 227 - RNA, 21 nt, Artificial
  siRNA polynucleotide, synthesized
uugaagcuccucuacuuggac

SEQ ID NO: 228 - RNA, 21 nt, Artificial
  siRNA polynucleotide, synthesized
uuggucguagaaggaaguccu

SEQ ID NO: 229 - RNA, 21 nt, Artificial
  siRNA polynucleotide, synthesized
uugcgagauaaggcaacacuc

SEQ ID NO: 230 - RNA, 21 nt, Artificial
  siRNA polynucleotide, synthesized
uuuaggauguguuccuggagu

SEQ ID NO: 231 - RNA, 21 nt, Artificial
  siRNA polynucleotide, synthesized
uuugcagaagauacuguugcc

SEQ ID NO: 232 - RNA, 21 nt, Artificial
  siRNA polynucleotide, synthesized
uugugucuccuccuauucgag

SEQ ID NO: 233 - RNA, 21 nt, Artificial
  siRNA polynucleotide, synthesized
uuguaagaagagaagacgacc

SEQ ID NO: 234 - RNA, 21 nt, Artificial
  siRNA polynucleotide, synthesized
uuuguucuucucucuggaugg

SEQ ID NO: 235 - RNA, 21 nt, Artificial
  siRNA polynucleotide, synthesized
uuucucucuggauggaagugg

SEQ ID NO: 236 - RNA, 21 nt, Artificial
  siRNA polynucleotide, synthesized
uucucuggauggaagugguuc

SEQ ID NO: 237 - RNA, 21 nt, Artificial
  siRNA polynucleotide, synthesized
uucuggauggaagugguucga

SEQ ID NO: 238 - RNA, 21 nt, Artificial
  siRNA polynucleotide, synthesized
uuggauggaagugguucgagu

SEQ ID NO: 239 - DNA, 21 bp, Homo sapiens
tactggatgtctcagacgtgc

SEQ ID NO: 240 - DNA, 21 bp, Homo sapiens
tacggaagccacctcgctatt

SEQ ID NO: 241 - DNA, 21 bp, Homo sapiens
taccttcaccaagctcatgga

SEQ ID NO: 242 - RNA, 21 nt, Artificial
  siRNA polynucleotide, synthesized
cuggaugucucagacgugcuu

SEQ ID NO: 243 - RNA, 21 nt, Artificial
  siRNA polynucleotide, synthesized
cggaagccaccucgcuauuuu

SEQ ID NO: 244 - RNA, 21 nt, Artificial
  siRNA polynucleotide, synthesized
ccuucaccaagcucauggauu

SEQ ID NO: 245 - RNA, 21 nt, Artificial
  siRNA polynucleotide, synthesized
uugaccuacagagucugcacg

SEQ ID NO: 246 - RNA, 21 nt, Artificial
  siRNA polynucleotide, synthesized
uugccuucgguggagcgauaa

SEQ ID NO: 247 - RNA, 21 nt, Artificial
  siRNA polynucleotide, synthesized
uuggaagugguucgaguaccu

SEQ ID NO: 248 - DNA, 34 bp, Artificial
  artificial PCR primer
caccatggagcagctggagatcggcgagctcatt

SEQ ID NO: 249 - DNA, 47 bp, Artificial
  artificial PCR primer
cttcagacgtctcatgatgttcctactgctgctattcatccgcggcg

SEQ ID NO: 250 - protein, 901 aa, Homo sapiens
MDRAALRAAAMGEKKEGGGGGDAAAAEGGAGAAASRALQQCGQLQKLIDISIGSLRGLRTKCAVSNDLTQQEIRTLEAKLVRYICKQRQCKLSVAPGERTPELNSYPRFSDWLYTFNVRPEVVQEIPRDLTLDALLEMNEAKVKETLRRCGASGDECGRLQYALTCLRKVTGLGGEHKEDSSWSSLDARRESGSGPSTDTLSAASLPWPPGSSQLGRAGNSAQGPRSISVSALPASDSPTPSFSEGLSDTCIPLHASGRLTPRALHSFITPPTTPQLRRHTKLKPPRTPPPPSRKVFQLLPSFPTLTRSKSHESQLGNRIDDVSSMRFDLSHGSPQMVRRDIGLSVTHRFSTKSWLSQVCHVCQKSMIFGVKCKHCRLKCHNKCTKEAPACRISFLPLTRLRRTESVPSDINNPVDRAAEPHFGTLPKALTKKEHPPAMNHLDSSSNPSSTTSSTPSSPAPFPTSSNPSSATTPPNPSPGQRDSRFNFPAAYFIHHRQQFIFPDISAFAHAAPLPEAADGTRLDDQPKADVLEAHEAEAEEPEAGKSEAEDDEDEVDDLPSSRRPWRGPISRKASQTSVYLQEWDIPFEQVELGEPIGQGRWGRVHRGRWHGEVAIRLLEMDGHNQDHLKLFKKEVMNYRQTRHENVVLFMGACMNPPHLAIITSFCKGRTLHSFVRDPKTSLDINKTRQIAQEIIKGMGYLHAKGIVHKDLKSKNVFYDNGKVVITDFGLFGISGVVREGRRENQLKLSHDWLCYLAPEIVREMTPGKDEDQLPFSKAADVYAFGTVWYELQARDWPLKNQAAEASIWQIGSGEGMKRVLTSVSLGKEVSEILSACWAFDLQERPSFSLLMDMLEKLPKLNRRLSHPGHFWKSADINSSKVVPRFERFGLGVLESSNPKM

SEQ ID NO: 251 - protein, 635 aa, Homo sapiens
EFRHTSALTQHTAHTQHTSAHTQHSFITPPTTPQLRRHTKLKPPRTPPPPSRKVFQLLPSFPTLTRSKSHESQLGNRIDDVSSMRFDLSHGSPQMVRRDIGLSVTHRFSTKSWLSQVCHVCQKSMIFGVKCKHCRLKCHNKCTKEAPACRISFLPLTRLRRTESVPSDINNPVDRAAEPHFGTLPKALTKKEHPPAMNHLDSSSNPSSTTSSTPSSPAPFPTSSNPSSATTPPNPSPGQRDSRFNFPAAYFIHHRQQFIFPDISAFAHAAPLPEAADGTRLDDQPKADVLEAHEAEAEEPEAGKSEAEDDEDEVDDLPSSRRPWRGPISRKASQTSVYLQEWDIPFEQVELGEPIGQGRWGRVHRGRWHGEVAIRLLEMDGHNQDHLKLFKKEVMNYRQTRHENVVLFMGACMNPPHLAIITSFCKGRTLHSFVRDPKTSLDINKTRQIAQEIIKGMGYLHAKGIVHKDLKSKNVFYDNGKVVITDFGLFGISGVVREGRRENQLKLSHDWLCYLAPEIVREMTPGKDEDQLPFSKAADVYAFGTVWYELQARDWPLKNQAAEASIWQIGSGEGMKRVLTSVSLGKEVSEILSACWAFDLQERPSFSLLMDMLEKLPKLNRRLSHPGHFWKSAEL

SEQ ID NO: 252 - protein, 873 aa, Mus musculus
MDRAALRAAAMGEKKEGGGGGAAADGGAGAAVSRALQQCGQLQKLIDISIGSLRGLRTKCSVSNDLTQQEIRTLEAKLVKYICKQQQSKLSVTPSDRTAELNSYPRFSDWLYIFNVRPEVVQEIPQELTLDALLEMDEAKAKEMLRRWGASTEECSRLQQALTCLRKVTGLGGEHKMDSGWSSTDARDSSLGPPMDMLSSLGRAGASTQGPRSISVSALPASDSPVPGLSEGLSDSCIPLHTSGRLTPRALHSFITPPTTPQLRRHAKLKPPRTPPPPSRKVFQLLPSFPTLTRSKSHESQLGNRIDDVTPMKFELPHGSPQLVRRDIGLSVTHRFSTKSWLSQVCNVCQKSMIFGVKCKHCRLKCHNKCTKEAPACRITFLPLARLRRTESVPSDINNPVDRAAEPHFGTLPKALTKKEHPPAMNLDSSSNPSSTTSSTPSSPAPFLTSSNPSSATTPPNPSPGQRDSRFSFPDISACSQAAPLSSTADSTRLDDQPKTDVLGVHEAEAEEPEAGKSEAEDDEEDEVDDLPSSRRPWRGPISRKASQTSVYLQEWDIPFEQVELGEPIGQGRWGRVHRGRWHGEVAIRLLEMDGHNQDHLKLFKKEVMNYRQTRHENVVLFMGACMNPPHLAIITSFCKGRTLHSFVRDPKTSLDINKTRQIAQEIIKGMGYLHAKGIVHKDLKSKNVFYDNGKVVITDFGLFGISGVVREERRENQLKLSHDWLCYLAPEIVREMIPGRDEDQLPFSKAADVYAFGTVWYELQARDWPFKHQPAEALIWQIGSGEGVRRVLASVSLGKEVGEILSACWAFDLQERPSFSLLMDMLERLPKLNRRLSHPGHFWKSADINSSKVMPRFERFGLGTLESGNPKM

SEQ ID NO: 253 - protein, 966 aa, Drosophila melanogaster
MSSNNNAPASAPDTGSTNANDPISGSLSVDSNLVIIQDMIDLSANHLEGLRTQCAISSTLTQQEIRCLESKLVRYFSELLLAKMRLNERIPANGLVPHTTGNELRQWLRVVGLSQGTLTACLARLTTLEQSLRLSDEEIRQLLADSPSQREEEELRRLTRAMQNLRKCMESLESGTAASNNDPEQWHWDSWDRPTHIHRGSVGNIGLGNNSTASPRTHHRQHGVKGKNSALANSTNFKSGRQSPSATEELNSTQGSQLTLTLTPSPPNSPFTPSSGLSSSLNGTPQRSRGTPPPARKHQTLLSQSHVQVDGEQLARNRLPTDPSPDSHSSTSSDIFVDPNTNASSGGSSSNVLMVPCSPGVGHVGMGHAIKHRFTKALGFMATCTLCQKQVFHRWMKCTDCKYICHKSCAPHVPPSCGLPREYVDEFRHIKEQGGYASLPHVHGAAKGSPLVKKSTLGKPLHQQHGDSSSPSSSCTSSTPSSPALFQQRERELDQAGSSSSANLLPTPSLGKHQPSQFNFPNVTVTSSGGSGGVSLISNEPVPEQFPTAPATANGGLDSLVSSSNGHMSSLIGSQTSNASTAATLTGSLVNSTTTTSTCSFFPRKLSTAGVDKRTPFTSEYTDTHKSNDSDKTVSLSGSASTDSDRTPVRVDSTEDGDSGQWRQNSISLKEWDIPYGDLLLLERIGQGRFGTVHRALWHGDVAVKLLNEDYLQDEHMLETFRSEVANFKNTRHENLVLFMGACMNPPYLAIVTSLCKGNTLYTYIHQRREKFAMNRTLLIAQQIAQGMGYLHAREIIHKDLRTKNIFIENGKVIITDFGLFSSTKLLYCDMGLGVPHNWLCYLAPELIRALQPEKPRGECLEFTPYSDVYSFGTVWYELICGEFTFKDQPAESIIWQVGRGMKQSLANLQSGRDVKDLLMLCWTYEKEHRPQFARLLSLLEHLPKKRLARSPSHPVNLSRSAESVF

SEQ ID NO: 254 - protein, 771 aa, Caenorhabditis elegans
MMQTQVASRAGYSNLPQFGAGIAQDIKTQAINNLKECLKLTTINRFLTSSYEEDAKSVERKIFSAVYQMTKIGLIDREKREINAIWFTFVGLSAQNIRHLEICSITDFNALFSITNQELRSLADRGRLDVETKRKLLQSTVILQNHWNAYHSRTSSGSTDEPSGQSTPAIVTPSPKFNVPSLSVTSAKMIQSSSMGFATTPKSPKTSSRLVHAIPHKWHRSTKFRFSGDAVCHFCQRPLGFGFLNAWEKCRSCKWKVHTQCKGRVGDSCGLTPDHLRFLFDKLIQENNGGMWKDPQSVPGSRSMNEPAFQFPDTAIDSSSSTNSSAPSTPALPAGISGNVSSLTAPYRSERKFLFPDTENYSVHNRLPILVISEGDHPTTTEIQQETENHNKSAAASMSGNIESEGTIVANHEDSTGSQEVDSEAAPSQEAVDKFNKRADGGFTWERHAWNMSTIRGPNAQASWNEVTIQFETIEFDKQAPIIGRGRFGKVLRGFHYGDVAVKVYTMEHISDASKKAEEFKLEVSAYKNTRHDNIALFLGYFMSDGQYGMVMSLSKGSQSLYTLLHVVREKLDLATTRKIAQQICQAVSYLHTKKILHKDLRSKNILLESKNKVVITDFGILSMKRLAHPKQKSGYLTSKFWTNYIAPELAMAMRTEYDEYECDDFPFSENSDVYAFGCVWFEMLTGALPYAGELPHQILFAKTQGIRPVLPNVKCTQELKELLVSCWNTAPQDRPTLTDINLKLTALPKKPRVNRSPSFPVMMKSYESTF
